(19) United States
(12) Patent Application Publication
(10) Pub. No.: US 2026/0216372 A1
(43) Pub. Date: Jul. 30, 2026

(54) COMPOSITIONS AND METHODS FOR THE TREATMENT OF NEUROLOGICAL DISORDERS RELATED TO GLUCOSYLCERAMIDASE BETA 1 DEFICIENCY

(71) Applicant: VOYAGER THERAPEUTICS, INC., Lexington, MA (US)

(72) Inventors: Hiu Yan CHUNG, Lexington, MA (US); Elisabeth KNOLL, Lexington, MA (US); Todd CARTER, Lexington, MA (US)

(21) Appl. No.: 19/146,705

(22) PCT Filed: Feb. 1, 2024
(86) PCT No.: PCT/US2024/014000

§ 371 Date: Jul. 9, 2025

(30) Foreign Application Priority Data
Feb. 2, 2023 (WO) PCT/US2023/061837

(51) Int. Cl. A61K 48/00; A61K 9/00; A61K 45/06; A61P 25/28; C07K 14/005; C12N 9/24; C12N 15/86; C12Q 1/34

(52) U.S. Cl. CPC A61K 48/005; A61K 9/0019; A61K 45/06; A61K 48/0075; A61K 48/0083; A61P 25/28; C07K 14/005; C12N 9/24; C12N 15/86; C12Q 1/34; C07K 2319/02; C12N 2750/14121; C12N 2750/14122; C12N 2750/14143; C12N 2750/14151; C12N 2830/15; C12N 2830/42; C12N 2830/50; C12Y 302/01045; G01N 2333/924

(57) ABSTRACT

The disclosure relates to compositions and methods for altering, e.g., enhancing, the expression of GCase proteins, whether in vitro and/or in vivo. Such compositions include delivery of an adeno-associated viral (AAV) particle. The compositions and methods of the present disclosure are useful in the treatment of subjects diagnosed with, or suspected of having Parkinson's Disease (PD), Gaucher Disease (GD), Dementia with Lewy Bodies (DLB), or related condition resulting from a deficiency in the quantity and/or function of GBA1 gene product or associated with decreased expression or protein levels of GCase protein.

### RELATED APPLICATIONS

[0001] This application claims the benefit of and priority to International Application No. PCT/US2023/061837, filed Feb. 2, 2023, the contents of which are incorporated herein by reference in their entirety.

### SEQUENCE LISTING

[0002] The present application is being filed along with a Sequence Listing in electronic format. The Sequence Listing file, entitled 14640-0070-01304_SL.xml, was created on Jan. 31, 2024, and is 5,007,704 bytes in size. The information in electronic format of the Sequence Listing is incorporated herein by reference in its entirety.

### FIELD OF THE DISCLOSURE

[0003] Described herein are compositions and methods relating to polynucleotides, e.g. polynucleotides encoding glucosylceramidase beta 1 (GBA1) proteins and peptides for use in the treatment of Parkinson Disease (PD) and other GBA-related disorders, including Gaucher Disease, and Dementia with Lewy Bodies (collectively, “GBA-related disorders”). In some embodiments, compositions may be delivered in an adeno-associated viral (AAV) vector. In other embodiments, compositions described herein, may be used to treat a subject in need thereof, such as a human subject diagnosed with a GBA1-related disorder or other condition resulting from a deficiency in the quantity and/or function of GBA1 protein, or as a research tool in the study of diseases or conditions in cells or animal models of such disease or condition.

### BACKGROUND

[0004] Lysosomal acid glucosylceramidase, commonly called glucosylcerebrosidase or Gcase, a D-glucosyl-N-acylsphingosine glucohydrolase, is a lysosomal membrane protein important in glycolipid metabolism. The enzyme is encoded by the glucosylceramidase beta 1 (GBA1) gene (Ensembl Gene ID No. ENSG00000177628). This enzyme, together with Saposin A and Saposin C, catalyzes the hydrolysis of glucosylceramide to ceramide and glucose. See Vaccaro, Anna Maria, et al. Journal of Biological Chemistry 272.27 (1997): 16862-16867, the contents of which are incorporated herein by reference in their entirety.

[0005] Mutations in GBA1 are known to cause disease in human subjects. Homozygous or compound heterozygous GBA1 mutations lead to Gaucher disease (“GD”). See Sardi, S. Pablo, Jesse M. Cedarbaum, and Patrik Brundin. Movement Disorders 33.5 (2018): 684-696, the contents of which are herein incorporated by reference in their entirety. Gaucher disease is one of the most prevalent lysosomal storage disorders, with an estimated standardized birth incidence in the general population of between 0.4 to 5.8 individuals per 100,000. Heterozygous GBA1 mutations can lead to PD. Indeed, GBA1 mutations occur in 7-10% of total PD patients, making GBA1 mutations the most important genetic risk factor of PD. PD-GBA1 patients have reduced levels of the lysosomal enzyme beta-glucocerebrosidase (Gcase), which results in increased accumulations of glycosphingolipid glucosylceramide (GluCer), which in turn is correlated with exacerbated α-Synuclein aggregation and concomitant neurological symptoms. Gaucher disease and PD, as well as other lysosomal storage disorders or Lewy body diseases such as Dementia with Lewy Bodies, and related diseases, in some cases, share common etiology in the GBA1 gene. See Sidransky, E. and Lopez, G. Lancet Neurol. 2012 November; 11(11): 986-998, the contents of which are incorporated by reference in their entirety. Limited treatment options exist for such diseases.

[0006] Consequently, there remains a long felt-need to develop pharmaceutical compositions and methods for the treatment of PD and other GBA1-related disorders and to ameliorate deficiencies of Gcase protein in patients afflicted with GBA1-related disorders.

### SUMMARY

[0007] The present disclosure addresses these challenges by providing AAV-based compositions and methods for treating Gcase deficiency in patients. Disclosed herein are compositions and methods directed to AAV-based gene delivery of Gcase to ameliorate loss-of-function and to improve intracellular lipid trafficking. The compositions and methods are useful to improve lysosomal glycolipid metabolism, and to slow, halt, or reverse neurodegenerative and other symptoms of PD and other GBA1-related disorders (e.g., dementia with Lewy Bodies (DLB), Gaucher disease (GD)) in a subject (e.g., a subject having a mutation in a GBA1 gene, e.g., a subject having a mutation in a GBA1 gene). Unless otherwise specified, GBA1 protein, GBA1 protein, and Gcase protein are synonymous terms and used interchangeably to refer to the protein encoded by the GBA1 gene.

[0008] In some embodiments, the present disclosure provides nucleotide sequences encoding a wildtype GBA1 protein, wherein the GBA1 encoding nucleotide sequence comprises an altered GC-content, and/or a reduced number of CpG motifs (e.g., lacking all CpG motifs) as compared to a wildtype GBA1 encoding sequence (e.g., comprising the nucleotide sequence of SEQ ID NO: 1776 or 1777). In some embodiments, the GBA1-encoding nucleotide sequences surprisingly provide high GBA1 expression in the brain (e.g., the cortex, striatum, and brainstem), high GBA1 activity (e.g., high glucosylceramide and glucosylsphingosine substrate clearance) in the brain, and reduced immunogenicity, e.g., as compared to a wildtype GBA1 encoding sequence (e.g., comprising the nucleotide sequence of SEQ ID NO: 1776 or 1777). In some embodiments, the GBA1-encoding nucleotide sequences described herein surprisingly provide reduced GBA1 expression in the dorsal root ganglion (DRG) while retaining high GBA1 activity in other areas of the brain (e.g., the brain stem), e.g., relative to a wildtype GBA1 encoding sequence (e.g., comprising the nucleotide sequence of SEQ ID NO: 1776 or 1777). In some embodiments, a nucleotide sequence encoding a wildtype GBA1 protein described herein can be administered to a subject having a GBA1-related disorder such as Parkinson's Disease.

[0009] In some embodiments, the GBA1-encoding nucleotide sequence comprises SEQ ID NO: 2001 or a sequence at least 94% identical (e.g., at least 94%, at least 95%, at least 96%, at least 97%, at least 98%, or at least 99%) thereto. In some embodiments, the GBA1-encoding nucleotide sequence comprises SEQ ID NO: 2002 or a sequence at least 93% identical (e.g., at least 93%, at least 94%, at least 95%, at least 96%, at least 97%, at least 98%, or at least 99%) thereto.

[0010] In some embodiments, the GBA1 encoding nucleotide sequence is comprised by an AAV viral genome comprising the nucleotide sequence of SEQ ID NO: 2006 or SEQ ID NO: 2007, or a sequence at least 97% identical (e.g., at least 97%, at least 98%, or at least 99%) thereto.

[0011] In some embodiments, the GBA1 encoding nucleotide sequence (e.g., SEQ ID NO: 2001 or SEQ ID NO: 2002, or a sequence at least 94% identical (e.g., at least 94%, at least 95%, at least 96%, at least 97%, at least 98%, or at least 99%) thereto) comprises lower GC content than the nucleotide sequences of SEQ ID NOs: 1772, 1773, 1780, or 1781.

[0012] In some embodiments, administration of a GBA1 encoding nucleotide sequence (e.g., a sequence comprising the nucleotide sequence of SEQ ID NO: 2001 or SEQ ID NO: 2002, or a sequence at least 94% identical (e.g., at least 94%, at least 95%, at least 96%, at least 97%, at least 98%, or at least 99%) thereto) to a subject results in higher GBA1 activity, e.g., higher glucosylceramide and glucosylsphingosine substrate reduction, in the brain of the subject as compared to administration of a sequence comprising the nucleotide sequences of SEQ ID NOs: 1772 or 1773.

[0013] In some embodiments, administration of an AAV particle comprising a GBA1 encoding nucleotide sequence (e.g., a nucleotide sequence comprising SEQ ID NO: 2007, or a sequence at least 97% identical (e.g., at least 97%, at least 98%, or at least 99%) thereto) to a subject results in reduced GBA1 expression in the DRG as compared to administration of a sequence comprising the nucleotide sequence of the nucleotide sequence of SEQ ID NO: 1772 or 1773, while the GBA1 activity in other brain regions (e.g., the brain stem) is not significantly reduced compared to administration of a sequence comprising the nucleotide sequence of the nucleotide sequence of SEQ ID NO: 1772 or 1773.

[0014] In some embodiments, the present disclosure provides an isolated nucleic acid comprising a transgene encoding a GBA1 protein, wherein the nucleotide sequence encoding the GBA1 protein comprises a codon-optimized nucleotide sequence that is at least 93% identical (e.g., at least 93%, at least 94%, at least 95%, at least 96%, at least 97%, at least 98%, at least 99%, or 100% identical) to the nucleotide sequence of SEQ ID NO: 2002. In some embodiments, the nucleotide sequence encoding the GBA1 protein comprises the nucleotide sequence of SEQ ID NO: 2002. In some embodiments, the isolated nucleic acid is or is comprised in a viral genome.

[0015] In some embodiments, the present disclosure provides an isolated nucleic acid comprising a nucleotide sequence that encodes a β-glucocerebrosidase 1 (GBA1) protein and is at least 93% identical (e.g., at least 93%, at least 94%, at least 95%, at least 96%, at least 97%, at least 98%, at least 99%, or 100% identical) to the nucleotide sequence of SEQ ID NO: 2002. In some embodiments, the isolated nucleic acid encoding the GBA1 protein comprises the nucleotide sequence of SEQ ID NO: 2002. In some embodiments, the isolated nucleic acid is or is comprised in a viral genome.

[0016] In some embodiments, the present disclosure provides an isolated nucleic acid comprising a transgene encoding a GBA1 protein, wherein the nucleotide sequence encoding the GBA1 protein comprises a codon-optimized nucleotide sequence that is at least 94% (e.g., at least 94%, at least 95%, at least 96%, at least 97%, at least 98%, at least 99%, or 100% identical) identical to the nucleotide sequence of SEQ ID NO: 2001. In some embodiments, the nucleotide sequence encoding the GBA1 protein comprises the nucleotide sequence of SEQ ID NO: 2001. In some embodiments, the nucleotide sequence encoding the GBA1 protein consists of the nucleotide sequence of SEQ ID NO: 2001. In some embodiments, the isolated nucleic acid is or is comprised in a viral genome.

[0017] In some embodiments, the present disclosure provides an isolated nucleic acid comprising a nucleotide sequence that encodes a β-glucocerebrosidase 1 (GBA1) protein and is at least 94% identical (e.g., at least 94%, at least 95%, at least 96%, at least 97%, at least 98%, at least 99%, or 100% identical) to the nucleotide sequence of SEQ ID NO: 2001. In some embodiments, the isolated nucleic acid encoding the GBA1 protein comprises the nucleotide sequence of SEQ ID NO: 2001. In some embodiments, the isolated nucleic acid encoding the GBA1 protein consists of the nucleotide sequence of SEQ ID NO: 2001. In some embodiments, the isolated nucleic acid is or is comprised in a viral genome.

[0018] In some embodiments, the disclosure provides an isolated nucleic acid comprising a transgene encoding a GBA1 protein and an enhancement element, wherein the encoded enhancement element comprises: a Saposin C polypeptide or functional fragment or variant thereof, optionally comprising the amino acid sequence of SEQ ID NO: 1789 or 1758, or an amino acid sequence at least 85% (e.g., at least 85%, at least 90%, at least 91%, at least 92%, at least 93%, at least 94%, at least 95%, at least 96%, at least 97%, at least 98%, at least 99%, or 100% identical) identical thereto; a cell penetrating peptide, optionally comprising the amino acid sequence of any of SEQ ID Nos: 1794, 1796, or 1798, or an amino acid sequence having at least one, two, or three but no more than four modifications, e.g., substitutions (e.g., conservative substitutions), relative to SEQ ID Nos: 1794, 1796, or 1798; and/or a lysosomal targeting sequence, optionally comprising the amino acid sequence of any of SEQ ID Nos: 1800, 1802, 1804, 1806, or 1808, or an amino acid sequence having at least one, two, or three but no more than four modifications, e.g., substitutions (e.g., conservative substitutions), relative to SEQ ID Nos: 1800, 1802, 1804, 1806, or 1808. In some embodiments, the isolated nucleic acid is or is comprised in a viral genome.

[0019] In some embodiments, the present disclosure provides a recombinant viral genome comprising a nucleic acid comprising a transgene encoding a GBA1 protein, and further comprising a nucleotide sequence encoding a miR binding site that modulates, e.g., reduces, expression of the encoded GBA1 protein in a cell or tissue of the DRG, liver, hematopoietic lineage, or a combination thereof. In some embodiments, the encoded miR binding site comprises a miR183 binding site. In some embodiments, the viral genome encodes multiple miR binding sites, e.g., four miR183 binding sites. In some embodiments, the viral genome further encodes an enhancement element, e.g., an enhancement element described herein.

[0020] In some embodiments, the present disclosure provides a recombinant viral genome comprising a promoter operably linked to a nucleic acid comprising a transgene encoding a GBA1 protein described herein. In some embodiments, the viral genome comprises an internal terminal repeat (ITR) sequence (e.g., an ITR region described herein), an enhancer (e.g., an enhancer described herein), an intron region (e.g., an intron region described herein), a Kozak sequence (e.g., a Kozak sequence described herein), an exon region (e.g., an exon region described herein), a nucleotide sequence encoding a miR binding site (e.g., a miR binding site described herein), and/or a poly A signal region (e.g., a poly A signal sequence described herein). In some embodiments, the viral genome comprises the nucleotide sequence of SEQ ID NO: 2006 or 2007, or a nucleotide sequence at least 97% identical thereto (e.g., at least 97%, at least 98 or 99% identical thereto). In some embodiments, the viral genome comprises the nucleotide sequence of SEQ ID NO: 2006 or a nucleotide sequence at least 97% identical (e.g., at least 97%, at least 98 or 99% identical) thereto. In some embodiments, the viral genome comprises the nucleotide sequence of SEQ ID NO: 2007 or a nucleotide sequence at least 97% identical (e.g., at least 97%, at least 98 or 99% identical) thereto.

[0021] In some embodiments, the present disclosure provides a recombinant AAV particle comprising a capsid protein and a viral genome comprising a promoter (e.g., a promoter described herein) operably linked to a transgene encoding a GBA1 protein described herein. In some embodiments, the capsid protein comprises an AAV capsid protein. In some embodiments, the capsid protein comprises a VOY101 capsid protein, an AAV5 capsid protein, an AAV9 capsid protein, or a functional variant thereof. In some embodiments, the recombinant AAV particle is an isolated AAV particle.

[0022] In some embodiments, the present disclosure provides a method of making a viral genome described herein. In some embodiments, the method of making a viral genome comprises providing a nucleic acid encoding a viral genome described herein and a backbone region suitable for replication of the viral genome in a cell, e.g., a bacterial cell (e.g., wherein the backbone region comprises one or both of a bacterial origin of replication and a selectable marker), and excising the viral from the backbone region, e.g., by cleaving the nucleic acid molecule at upstream and downstream of the viral genome.

[0023] In some embodiments, the present disclosure provides a method of making a recombinant AAV particle. In some embodiments, the method of making a recombinant AAV particle comprises providing a host cell comprising a viral genome described herein and incubating the host cell under conditions suitable to enclose the viral genome in the AAV particle, e.g., a VOY101 capsid protein, thereby making the isolated AAV particle.

[0024] In some embodiments, the present disclosure provides method of delivering a nucleic acid encoding GBA1 protein to a subject, the method comprising administering an effective amount of an AAV particle or a plurality of AAV particles, described herein, said AAV particle comprising a viral genome described herein, e.g., a viral genome comprising a nucleic acid comprising a transgene encoding a GBA1 protein described herein.

[0025] In some embodiments, the present disclosure provides a method of treating a subject having or diagnosed with having a disease associated with GBA1 expression, a neurological disorder, or a neuromuscular disorder. In some embodiments, the method comprises administering an effective amount of an AAV particle or a plurality of AAV particles, described herein, said AAV particle comprising a viral genome described herein, e.g., a viral genome comprising a nucleic acid comprising a transgene encoding a GBA1 protein described herein. In some embodiments, the disease associated with expression of GBA1 or the neurodegenerative or neuromuscular disorder comprises Parkinson's Disease (PD) (e.g., a PD associated with one or more mutations in a GBA1 gene), dementia with Lewy Bodies (DLB), Gaucher disease (GD) (e.g., Type 1 GD (GD1) or Type 3 GD (GD3)), Spinal muscular atrophy (SMA), Multiple System Atrophy (MSA), or Multiple sclerosis (MS).

[0026] In some embodiments, the present disclosure provides AAV viral genomes comprising at least one inverted terminal repeat (ITR) and a payload region, wherein the payload region encodes one or more GBA1 proteins. In some embodiments, the AAV viral genome comprises a 5′ ITR, a promoter, a payload region comprising a nucleotide sequence encoding a GBA1 protein, and a 3′ ITR. The encoded protein may be a human (Homo sapiens) GBA1, a cynomolgus monkey (Macaca fascicularis) GBA1, or a rhesus monkey (Macaca mulatta) GBA1, a synthetic (non-naturally occurring) GBA1, or a derivative thereof, e.g., a variant that retains one or more function of a wild-type GBA1 protein. In some embodiments, the GBA1 may be at least partially humanized. In some embodiments, the encoded protein is a wild-type human GBA1 protein.

[0027] The GCase of the present disclosure can be co-expressed with a saposin protein. In some embodiments, the transgene encoding the GCase includes a nucleotide sequence encoding the saposin protein. In some embodiments, the saposin protein is saposin A (SapA). In some embodiments, the saposin protein in saposin C (SapC).

[0028] Viral genomes may be incorporated into an AAV particle, wherein the AAV particle comprises a viral genome and a capsid. In some embodiments, the capsid comprises a sequence as shown in Table 1.

[0029] In some embodiments, the AAV particles described herein may be used in pharmaceutical compositions. The pharmaceutical compositions may be used to treat a disorder or condition associated with decreased GBA1 expression, activity, or protein levels. In some embodiments, the disorder or condition is a lysosomal lipid storage disorder. In some embodiments, the disorder or condition associated with decreased GBA1 protein levels is PD (e.g., a PD associated with one or more mutations in a GBA1 gene), Gaucher disease (e.g., Type 1 GD (e.g., non-neuronopathic GD (GD1)), Type 2 (e.g., acute neuronopathic GD (GD2)), or Type 3 GD (GD3)), or other GBA1-related disorder (e.g., dementia with Lewy Bodies (DLB)). In some embodiments, the disorder or condition associated with decreased GBA1 protein levels is PD. In some embodiments, the disorder or condition associated with decreased GBA1 protein levels is GD. In some embodiments, the GD is GD1 or GD3. In some embodiments, the disorder or condition associated with decreased GBA1 protein level is DLB.

[0030] In some embodiments, administration of AAV particles results in enhanced GBA1 expression in a target cell.

[0031] In some aspects, the present disclosure provides methods of increasing GCase enzyme activity in patients using AAV-mediated gene transfer of an optimized GBA1 transgene cassette. The AAV-mediated gene transfer can be delivered to the CNS, and thereby decrease substrate glycosphingolipid glucosylceramide/GluCer levels and α-synuclein pathology, slowing or reversing disease pathogenesis in patients with GBA1-related disorders, including GBA1 patients with Parkinson's Disease (GBA1-PD), Gaucher disease (e.g., Type 2 or 3 GD), and Dementia with Lewy body disease. In some embodiments, the methods involve intrastriatal (ISTR) or intracisternal (ICM) administration of AAV vectors packaging optimized GBA1 gene replacement transgene cassettes as described herein to achieve widespread, cell-autonomous transduction and cross-correction of a therapeutic GBA1 enzyme.

[0032] Those skilled in the art will recognize or be able to ascertain using no more than routine experimentation, many equivalents to the specific embodiments of the invention described herein. Such equivalents are intended to be encompassed by the following enumerated embodiments.

### Enumerated Embodiments

[0033] 1. An isolated nucleic acid that encodes a β-glucocerebrosidase 1 (GBA1) protein and is at least 93% (e.g., 93, 94, 95, 96, 97, 98, 99, or 100% identical) to the nucleotide sequence of SEQ ID NO: 2002.
[0034] 2. The isolated nucleic acid of embodiment 1, wherein the nucleotide sequence encoding the GBA1 protein comprises a nucleotide sequence at least 93% identical to SEQ ID NO: 2002.
[0035] 3. The isolated nucleic acid of embodiment 1 or 2, wherein the nucleotide sequence encoding the GBA1 protein comprises a nucleotide sequence at least 95% identical to SEQ ID NO: 2002.
[0036] 4. The isolated nucleic acid of any one of embodiments 1-3, wherein the nucleotide sequence encoding the GBA1 protein comprises the nucleotide sequence of SEQ ID NO: 2002.
[0037] 5. The isolated nucleic acid of any one of embodiments 1-4, further comprising an enhancement element.
[0038] 6. An isolated, e.g., recombinant, nucleic acid comprising a transgene encoding a β-glucocerebrosidase 1 (GBA1) protein and an enhancement element, wherein the encoded enhancement element comprises:
   [0039] (a) a Saposin C polypeptide or functional fragment or variant thereof, optionally comprising the amino acid sequence of SEQ ID NO: 1789 or 1758, or an amino acid sequence at least 85% (e.g., at least 90%, 92%, 95%, 97%, 98%, or 99%) identical thereto;
   [0040] (b) a cell penetrating peptide, optionally comprising the amino acid sequence of any of SEQ ID NOs: 1794, 1796, or 1798, or an amino acid sequence having at least one, two, or three but no more than four modifications, e.g., substitutions (e.g., conservative substitutions), relative to SEQ ID NOs: 1794, 1796, or 1798; and/or
   [0041] (c) a lysosomal targeting sequence, optionally comprising the amino acid sequence of any of SEQ ID NOs: 1800, 1802, 1804, 1806, or 1808, or an amino acid sequence having at least one, two, or three but no more than four modifications, e.g., substitutions (e.g., conservative substitutions), relative to SEQ ID NOs: 1800, 1802, 1804, 1806, or 1808.
[0042] 7. A recombinant viral genome comprising a nucleic acid encoding a β-glucocerebrosidase 1 (GBA1) protein, further comprising a nucleotide sequence encoding a miR binding site that modulates, e.g., reduces, expression of the encoded GBA1 protein in a cell or tissue of the DRG, liver, hematopoietic lineage, or a combination thereof; wherein, optionally, the recombinant viral genome comprises the nucleic acid of any one of embodiments 1-6.
[0043] 8. The viral genome of embodiment 7, wherein the nucleic acid further encodes an enhancement element.
[0044] 9. The isolated nucleic acid of embodiment 5 or 6, or the viral genome of embodiment 8, wherein the encoded enhancement element comprises a Saposin C polypeptide or functional fragment or variant thereof.
[0045] 10. The isolated nucleic acid of embodiment 5-6 or 9, or the viral genome of embodiment 8 or 9, wherein:
   [0046] (i) the encoded Saposin C polypeptide or functional fragment or variant thereof comprises the amino acid sequence of SEQ ID NO: 1789 or 1758, or an amino acid sequence at least sequence at least 85% (e.g., at least 90%, 92%, 95%, 97%, 98%, or 99%) identical thereto; and/or
   [0047] (ii) the nucleotide sequence encoding the encoded Saposin C polypeptide or functional fragment or variant thereof comprises the nucleotide sequence of SEQ ID NO: 1787 or 1791, or a nucleotide sequence at least 85% (e.g., at least 90%, 92%, 95%, 97%, 98%, or 99%) identical thereto.
[0048] 11. The isolated nucleic acid of embodiment 5, or the viral genome of embodiment 8, wherein:
   [0049] (i) the encoded enhancement element comprises the amino acid sequence of any of SEQ ID NOs: 1750, 1752, 1754, 1756-1758, 1784, or 1785, an amino acid sequence having at least one, two, or three but no more than four modifications, e.g., substitutions (e.g., conservative substitutions), relative to SEQ ID NO: 1750, 1752, 1754, 1756-1758, 1784, or 1785, or an amino acid sequence at least 85% (e.g., at least 90%, 92%, 95%, 97%, 98%, or 99%) identical thereto; and/or
   [0050] (ii) the nucleotide sequence encoding the enhancement element comprises the nucleotide sequence of any one of SEQ ID NOs: 1751, 1753, 1755, 1858, or 1859, or a nucleotide sequence at least 85% (e.g., at least 90%, 92%, 95%, 97%, 98%, or 99%) identical thereto.
   [0051] 12. The isolated nucleic acid of any one of embodiments 5-6 or 9-11, or the viral genome of embodiment 8-11, wherein the encoded enhancement element comprises a cell penetrating peptide.
[0052] 13. The isolated nucleic acid of embodiment 6 or 12, or the viral genome of embodiment 12, wherein:
   [0053] (i) the cell penetrating peptide comprises the amino acid sequence of any of SEQ ID NOs: 1794, 1796, or 1798, or an amino acid sequence having at least one, two, or three but no more than four modifications, e.g., substitutions (e.g., conservative substitutions), relative to SEQ ID NOs: 1794, 1796, or 1798;
   [0054] (ii) the nucleotide sequence encoding the cell penetrating peptide comprises the nucleotide sequence of any of SEQ ID NOs: 1793, 1795, or 1797, or a nucleotide sequence at least 80% (e.g., 85%, 90%, 92%, 95%, 96%, 97%, 98%, or 99%) identical thereto.
[0055] 14. The isolated nucleic acid of any one of embodiments 5-6 or 9-13, or the viral genome of any one of embodiments 8-13, wherein the encoded enhancement element comprises a lysosomal targeting sequence.
[0056] 15. The isolated nucleic of embodiment 6 or 14, or the viral genome of any one of embodiment 14, wherein:
   [0057] (i) the encoded lysosomal targeting sequence comprises the amino acid sequence of any of SEQ ID NOs: 1800, 1802, 1804, 1806, or 1808, or an amino acid sequence having at least one, two, or three but no more than four modifications, e.g., substitutions (e.g., conservative substitutions), relative to SEQ ID NOs: 1800, 1802, 1804, 1806, or 1808;
   [0058] (ii) the nucleotide sequence encoding the lysosomal targeting sequence comprises the nucleotide sequence of any of SEQ ID NO: 1799, 1801, 1803, 1805, or 1807, or a nucleotide sequence having at least one, two, or three but no more than four modifications, e.g., substitutions (e.g., conservative substitutions), relative to SEQ ID NOs: 1799, 1801, 1803, 1805, or 1807.
[0059] 16. The isolated nucleic acid of any one of embodiments 5-6 or 9-15, or the viral genome of any one of embodiments 8-15, wherein the nucleic acid encodes at least 2, 3, 4 or more enhancement elements.
[0060] 17. The isolated nucleic acid of any one of embodiments 5-6 or 9-16, or the viral genome of any one of embodiments 8-16, wherein the nucleic acid encodes two enhancement elements, wherein:
   [0061] (i) the first enhancement element comprises a lysosomal targeting sequence, optionally wherein the lysosomal targeting sequence comprises the amino acid sequence of SEQ ID NO: 1802, or an amino acid sequence having at least one, two, or three but no more than four modifications, e.g., substitutions (e.g., conservative substitutions), relative to SEQ ID NO: 1802; and
   [0062] (ii) the second enhancement element comprises Saposin C polypeptide or functional fragment or variant thereof, optionally wherein the Saposin C polypeptide or functional fragment or variant thereof comprises the amino acid sequence of SEQ ID NO: 1789, or an amino acid sequence having at least one, two, or three but no more than four modifications, e.g., substitutions (e.g., conservative substitutions), relative to SEQ ID NO: 1789.
[0063] 18. The isolated nucleic acid or viral genome of embodiment 17, wherein the nucleic acid encoding the first enhancement element and the second enhancement element, comprises the nucleotide sequences of 1801 and 1787, a nucleotide sequence at least 85% (e.g., at least 90%, 92%, 95%, 97%, 98%, or 99%) identical to SEQ ID NOs: 1801 and 1787, or a nucleotide sequence having at least one, two, or three but no more than four modifications, e.g., substitutions (e.g., conservative substitutions), relative to SEQ ID NOs: 1801 and 1787.
[0064] 19. The isolated nucleic acid of any one of embodiments 5-6 or 9-17, or the viral genome of any one of embodiments 8-18, wherein the nucleic acid encodes a first enhancement element and a second enhancement element, wherein:
   [0065] (i) the first enhancement element a cell penetrating peptide, optionally wherein the cell penetrating peptide comprises the amino acid sequence of SEQ ID NO: 1798, or an amino acid sequence having at least one, two, or three but no more than four modifications, e.g., substitutions (e.g., conservative substitutions), relative to SEQ ID NO: 1798; and
   [0066] (ii) the second enhancement element comprises a lysosomal targeting sequence, optionally wherein the lysosomal targeting sequence comprises the amino acid sequence of SEQ ID NO: 1802, or an amino acid sequence having at least one, two, or three but no more than four modifications, e.g., substitutions (e.g., conservative substitutions), relative to SEQ ID NO: 1802.
[0067] 20. The isolated nucleic acid or viral genome of embodiment 19, wherein the nucleic acid encoding the first enhancement element and the second enhancement element, comprises the nucleotide sequences of 1797 and 1801, a nucleotide sequence at least 85% (e.g., at least 90%, 92%, 95%, 97%, 98%, or 99%) identical to SEQ ID NOs: 1797 and 1801, or a nucleotide sequence having at least one, two, or three but no more than four modifications, e.g., substitutions (e.g., conservative substitutions), relative to SEQ ID NOs: 1797 and 1801.
[0068] 21. The isolated nucleic acid of any one of embodiments 5-6 or 9-20, or the viral genome of any one of embodiments 8-20, wherein the nucleic acid encodes a first enhancement element, a second enhancement element and a third enhancement element, wherein:
   [0069] (i) the first enhancement element comprises a lysosomal targeting sequence, optionally wherein the lysosomal targeting sequence comprises the amino acid sequence of SEQ ID NO: 1802, or an amino acid sequence having at least one, two, or three but no more than four modifications, e.g., substitutions (e.g., conservative substitutions), relative to SEQ ID NO: 1802;
   [0070] (ii) the second enhancement element comprises a cell penetrating peptide, optionally wherein the cell penetrating peptide comprises the amino acid sequence of SEQ ID NO: 1798, or an amino acid sequence having at least one, two, or three but no more than four modifications, e.g., substitutions (e.g., conservative substitutions), relative to SEQ ID NO: 1798; and
   [0071] (iii) the third enhancement element comprises Saposin C polypeptide or functional fragment or variant thereof, optionally wherein the Saposin C polypeptide or functional fragment or variant thereof comprises amino acid sequence of SEQ ID NO: 1789, or an amino acid sequence having at least one, two, or three but no more than four modifications, e.g., substitutions (e.g., conservative substitutions), relative to SEQ ID NO: 1789.
[0072] 22. The isolated nucleic acid or viral genome of embodiment 21, wherein the nucleic acid encoding the first enhancement element, the second enhancement element, and the third enhancement element, comprises the nucleotide sequences of 1801, 1797, and 1787, a nucleotide sequence at least 85% (e.g., at least 90%, 92%, 95%, 97%, 98%, or 99%) identical to SEQ ID NOs: 1801, 1797, and 1787, or a nucleotide sequence having at least one, two, or three but no more than four modifications, e.g., substitutions (e.g., conservative substitutions), relative to SEQ ID NOs: 1801, 1797, and 1787.
[0073] 23. The isolated nucleic acid of any one of embodiments 1-6 or 9-22, or the viral genome of any one of embodiments 7-22, wherein the nucleic acid further encodes a linker.
[0074] 24. The isolated nucleic acid of any one of embodiments 5-6 or 9-22, or the viral genome of any one of embodiments 8-22, wherein the encoded enhancement element and the encoded GBA1 protein are connected directly, e.g., without a linker.
[0075] 25. The isolated nucleic acid of any one of embodiments 5-6 or 9-23, or the viral genome of any one of embodiments 8-23, wherein the encoded enhancement element and the encoded GBA1 protein are connected via the encoded linker.
[0076] 26. The isolated nucleic acid or viral genome of embodiment 23 or 25, wherein:
   [0077] (i) the encoded linker comprises the amino acid sequence of any of SEQ ID NOs: 1854, 1855, 1843, or 1845, or an amino acid sequence having at least one, two, or three but no more than four modifications, e.g., substitutions (e.g., conservative substitutions), relative to SEQ ID NOs: 1854, 1855, 1843, or 1845;
   [0078] (ii) the nucleotide sequence encoding the linker comprises the nucleotide sequence of any one of SEQ ID NOs: 1724, 1726, 1729, or 1730, or a nucleotide sequence having at least one, two, or three but no more than four modifications, e.g., substitutions (e.g., conservative substitutions), relative to SEQ ID NOs: 1724, 1726, 1729, or 1730;
   [0079] (iii) the encoded linker comprises a furin cleavage site;
   [0080] (iv) the encoded linker comprises a T2A polypeptide;
   [0081] (v) the encoded linker comprises a (Gly4Ser)n linker (SEQ ID NO: 1871), wherein n is 1-10, e.g., n is 3, 4, or 5; and/or
   [0082] (vi) the encoded linker comprises a (Gly4Ser) 3 linker (SEQ ID NO: 1845).
[0083] 27. The isolated nucleic acid or the viral genome of any one of embodiments 23 or 25-26, wherein:
   [0084] (i) the encoded linker comprises the amino acid sequence of SEQ ID NO: 1854 and/or the amino acid sequence of SEQ ID NO: 1855, or an amino acid sequence having at least one, two, or three but no more than four modifications, e.g., substitutions, relative to SEQ ID NO: 1854 and/or 1855; and/or
   [0085] (ii) the nucleotide sequence encoding the linker comprises the nucleotide sequence of SEQ ID NO: 1724 and/or the nucleotide sequence of SEQ ID NO: 1726, or a nucleotide sequence having at least one, two, or three but no more than four modifications, e.g., substitutions, relative to SEQ ID NO: 1724 and/or 1726.
[0086] 28. The isolated nucleic acid of any one of embodiments 23 or 25-27, or the viral genome of any one of embodiments 23 or 25-26, wherein:
   [0087] (i) the encoded linker comprises the amino acid sequence of SEQ ID NO: 1845, or an amino acid sequence having at least one, two, or three but no more than four modifications, e.g., substitutions, relative to SEQ ID NO: 1845;
   [0088] (ii) the nucleotide sequence encoding the linker comprises the nucleotide sequence of SEQ ID NO: 1730, or a nucleotide sequence having at least one, two, or three but no more than four modifications, e.g., substitutions, relative to SEQ ID NO: 1730.
[0089] 29. The isolated nucleic acid of any one of embodiments 5-6 or 9-28, or the viral genome of any one of embodiments 8-28, wherein the encoded GBA1 protein and the encoded enhancement element are expressed as a single polypeptide.
[0090] 30. The isolated nucleic acid of any one of embodiments 5-6 or 9-28, or the viral genome of any one of embodiments 8-28, wherein the single polypeptide comprises a cleavage site present between the encoded GBA1 protein and the encoded enhancement element, optionally wherein the cleavage site is an T2A and/or a furin cleavage site.
[0091] 31. The isolated nucleic acid of any one of embodiments 5-6 or 9-30, or the viral genome of any one of embodiments 8-30, wherein:
   [0092] (i) the nucleotide sequence encoding the enhancement element is located 5′ relative to the nucleotide sequence encoding the GBA1 protein; and/or
   [0093] (ii) the nucleotide sequence encoding the enhancement element is located 3′ relative to the nucleotide sequence encoding the GBA1 protein.
[0094] 32. The isolated nucleic acid of any one of embodiments 1-6 or 9-31, or the viral genome of any one of embodiments 7-31, wherein the encoded GBA1 protein comprises the amino acid sequence of SEQ ID NO: 1775, or an amino acid sequence at least 70% (e.g., at least 75%, 80%, 85%, 90%, 92%, 95%, 97%, 98%, or 99%) identical thereto.
[0095] 33. The isolated nucleic acid of any one of embodiments 6 or 9-32, or the viral genome of any one of embodiments 7-32, wherein the nucleotide sequence encoding the GBA1 protein comprises the nucleotide sequence of SEQ ID NO: 2002, or a nucleotide sequence at least 93% (e.g., at least 94%, 95%, 96%, 97%, 98%, or 99%) identical thereto.
[0096] 34. The isolated nucleic acid of any one of embodiments 1-6 or 9-33, or the viral genome of any one of embodiments 7-33, wherein the nucleotide sequence encoding the GBA1 protein comprises the nucleotide sequence of SEQ ID NO: 2002.
[0097] 35. The isolated nucleic acid of any one of embodiments 1-6 or 9-34, or the viral genome of any one of embodiments 7-37, further encoding a signal sequence comprising any one of SEQ ID NOs: 1850-1853, 1856, 1857, or 2005.
[0098] 36. The isolated nucleic acid or the viral genome of embodiment 35, wherein the encoded signal sequence comprises the amino acid sequence of SEQ ID NO: 2005.
[0099] 37. The isolated nucleic acid or the viral genome of any one of embodiment 35 or 36, wherein the nucleotide sequence encoding the signal sequence is located:
   [0100] (i) 5′ relative to the nucleotide sequence encoding the GBA1 protein; and/or
   [0101] (ii) 5′ relative to the encoded enhancement element.
[0102] 38. The isolated nucleic acid or the viral genome of embodiment 35 or 36, wherein the nucleotide sequence encoding the GBA1 protein comprises the nucleotide sequence of SEQ ID NO: 2001 or a nucleotide sequence that is at least 97% (e.g., 97%, 98%, 99%, or 100% identical) thereto.
[0103] 39. The isolated nucleic acid or the viral genome of embodiment 38, wherein the nucleotide sequence encoding the GBA1 protein comprises the nucleotide sequence of SEQ ID NO: 2001.
[0104] 40. The isolated nucleic acid or the viral genome of embodiment 38 or embodiment 39, wherein the nucleotide sequence encoding the GBA1 protein consists of the nucleotide sequence of SEQ ID NO: 2001.
[0105] 39. An isolated nucleic acid or viral genome comprising a nucleotide sequence encoding a β-glucocerebrosidase 1 (GBA1) protein, wherein the GBA1-encoding nucleotide sequence comprises a nucleotide sequence encoding a signal sequence comprising the nucleotide sequence of SEQ ID NO: 2005, or a nucleotide sequence at least 85% (e.g., 85%, 88%, 90%, 92%, 95%, 96%, 97%, 98%, 99%, or 100% identical) thereto; and a nucleotide sequence encoding a GBA1 protein comprising the nucleotide sequence of SEQ ID NO: 2002, or a nucleotide sequence at least 93% (e.g., 93%, 94%, 95%, 96%, 97%, 98%, 99%, or 100% identical) thereto.
[0106] 40. The isolated nucleic acid or viral genome of embodiment 39, wherein the nucleotide sequence encoding the signal sequence comprises the nucleotide sequence of SEQ ID NO: 2005 or a nucleotide sequence at least 99% identical thereto.
[0107] 41. An isolated nucleic acid or viral genome comprising the nucleotide sequence of SEQ ID NO: 2001 or a nucleotide sequence at least 94% (e.g., 94%, 95%, 96%, 97%, 98%, 99%, or 100% identical) thereto, wherein the nucleotide sequence encodes a β-glucocerebrosidase 1 (GBA1) protein.
[0108] 42. The isolated nucleic acid or viral genome of embodiment 41, wherein the nucleotide sequence encoding the GBA1 protein comprises or consists of the nucleotide sequence of SEQ ID NO: 2001.
[0109] 43. An isolated, e.g., recombinant, viral genome comprising a promoter operably linked to the nucleic acid of any one of embodiments 1-6 or 9-42.
[0110] 44. The viral genome of any one of embodiments 7-43, further comprising a promoter operably linked to the nucleic acid encoding the GBA1 protein.
[0111] 45. The viral genome of any one of embodiments 7-44, which further comprises an enhancer.
[0112] 46. The viral genome of embodiment 45, wherein the enhancer comprises a CMVie enhancer.
[0113] 47. The viral genome of embodiment 45 or 46, wherein the enhancer comprises the nucleotide sequence of SEQ ID NO: 1831, or a nucleotide sequence at least 95% identical thereto.
[0114] 48. The viral genome of any one of embodiments 43-47, wherein the promoter comprises a tissue specific promoter.
[0115] 49. The viral genome of any one of embodiments 43-47, wherein the promoter comprises a ubiquitous promoter.
[0116] 50. The viral genome of any one of embodiments 43-49, wherein the promoter comprises:
   [0117] (i) an EF-1a promoter, a chicken β-actin (CBA) promoter and/or its derivative CAG, a CMV immediate-early enhancer and/or promoter, a β glucuronidase (GUSB) promoter, a ubiquitin C (UBC) promoter, a neuron-specific enolase (NSE), a platelet-derived growth factor (PDGF) promoter, a platelet-derived growth factor B-chain (PDGF-β) promoter, an intercellular adhesion molecule 2 (ICAM-2) promoter, a synapsin (Syn) promoter, a methyl-CpG binding protein 2 (MeCP2) promoter, a Ca2+/calmodulin-dependent protein kinase II (CaMKII) promoter, a metabotropic glutamate receptor 2 (mGluR2) promoter, a neurofilament light (NFL) or heavy (NFH) promoter, a β-globin minigene nβ2 promoter, a preproenkephalin (PPE) promoter, an enkephalin (Enk) and excitatory amino acid transporter 2 (EAAT2), a glial fibrillary acidic protein (GFAP) promoter, a myelin basic protein (MBP) promoter, a cardiovascular promoter (e.g., αMHC, cTnT, and CMV-MLC2k), a liver promoter (e.g., hAAT, TBG), a skeletal muscle promoter (e.g., desmin, MCK, C512) or a fragment, e.g., a truncation, or a functional variant thereof; and/or
   [0118] (ii) the nucleotide sequence of any of SEQ ID NOs: 1832, 1833, 1834, 1835, 1836, 1839, 1840, or a nucleotide sequence at least 95% identical thereto.
[0119] 51. The viral genome of any one of embodiments 43-47, wherein the promoter comprises a CB promoter or functional variant thereof.
[0120] 52. The viral genome of embodiment 51, wherein the CB promoter or functional variant thereof comprises the nucleotide sequence of SEQ ID NO: 1834, or a nucleotide sequence at least 95% identical thereto.
[0121] 53. The viral genome of any one of embodiments 51 or 52, wherein the promoter comprises a CMVie enhancer and a CB promoter.
[0122] 54. The viral genome of embodiment 53, wherein the CMVie enhancer comprises the nucleotide sequence of SEQ ID NO: 1831, or a nucleotide sequence at least 95% identical thereto, and the CB promoter comprises the nucleotide sequence of SEQ ID NO: 1834, or a nucleotide sequence at least 95% identical thereto.
[0123] 55. The viral genome of embodiment 50, wherein the promoter comprises an EF-1a promoter or functional variant thereof.
[0124] 56. The viral genome of embodiment 55, wherein the EF-1a promoter or functional variant thereof comprises the nucleotide sequence of SEQ ID NO: 1839 or 1840, or a nucleotide sequence at least 95% identical thereto.
[0125] 57. The viral genome of embodiment 55 or 56, wherein the EF-1a promoter or functional variant thereof comprises an intron, e.g., an intron comprising the nucleotide sequence of positions 242-1180 of SEQ ID NO: 1839 or an intron comprising the nucleotide sequence of SEQ ID NO: 1841, or a nucleotide sequence at least 95% identical thereto.
[0126] 58. The viral genome of any one of embodiments 55-57, wherein the EF-1a promoter or functional variant thereof does not comprise an intron, e.g., an intron comprising the nucleotide sequence of positions 242-1180 of SEQ ID NO: 1839 or an intron comprising the nucleotide sequence of SEQ ID NO: 1841, or a nucleotide sequence at least 95% identical thereto.
[0127] 59. The viral genome of embodiment 50, wherein the promoter comprises a CBA promoter or functional variant thereof.
[0128] 60. The viral genome of embodiment 59, wherein the CBA promoter functional variant thereof comprises the nucleotide sequence of SEQ ID NO: 1836, or a nucleotide sequence at least 95% identical thereto.
[0129] 61. The viral genome of any one of embodiments 43-47, wherein the promoter comprises a CMVie enhancer, a CBA promoter or functional variant thereof, and an intron.
[0130] 62. The viral genome of embodiment 61, wherein:
   [0131] (i) the CMVie enhancer comprises the nucleotide sequence of SEQ ID NO: 1831, or a nucleotide sequence at least 95% identical thereto;
   [0132] (ii) the CBA promoter or functional variant thereof comprises the nucleotide sequence of SEQ ID NO: 1836, or a nucleotide sequence at least 95% identical thereto; and
   [0133] (iii) the intron comprises the nucleotide sequence of SEQ ID NO: 1837, or a nucleotide sequence at least 95% identical thereto.
[0134] 63. The viral genome of embodiments 50, wherein the promoter comprises a CAG promoter region.
[0135] 64. The viral genome of any one of embodiments 43-47 or 63, wherein the promoter comprises a CAG promoter region comprising:
   [0136] (i) a CMVie enhancer, a CBA promoter or functional variant thereof, and an intron; and/or
   [0137] (ii) the nucleotide sequence of SEQ ID NO: 1835, or a nucleotide sequence at least 95% identical thereto.
[0138] 65. The viral genome of any one of embodiments 43-47, wherein the promoter comprises a CMV promoter or functional variant thereof.
[0139] 66. The viral genome of embodiment 67, wherein the CMV promoter or functional variant thereof comprises the nucleotide sequence of SEQ ID NO: 1832, or a nucleotide sequence at least 95% identical thereto.
[0140] 67. The viral genome of any one of embodiments 43-47, wherein the promoter comprises a CMVie enhancer and a CMV promoter or functional variant thereof, optionally wherein the CMVie enhancer comprises the nucleotide sequence of SEQ ID NO: 1831, or a nucleotide sequence at least 95% identical thereto, and the CMV promoter or functional variant thereof comprises the nucleotide sequence of SEQ ID NO: 1832, or a nucleotide sequence at least 95% identical thereto.
[0141] 68. The viral genome of any one of embodiments 43-47, wherein the promoter comprises a CMV promoter region.
[0142] 69. The viral genome of embodiment 68, wherein the CMV promoter region comprises:
   [0143] (i) a CMVie enhancer and a CMV promoter or functional variant thereof;
   [0144] (ii) the nucleotide sequence of SEQ ID NO: 1833, or a nucleotide sequence at least 95% identical thereto.
[0145] 70. The viral genome of any one of embodiments 7-69, which further comprises an inverted terminal repeat (ITR) sequence.
[0146] 71. The viral genome of embodiment 70, wherein the ITR sequence is positioned 5′ relative to the nucleic acid encoding the GBA1 protein.
[0147] 72. The viral genome of embodiment 70 or 71, wherein the ITR sequence is positioned 3′ relative to the nucleic acid encoding the GBA1 protein.
[0148] 73. The viral genome of any one of embodiments 7-72, which comprises an ITR positioned 5′ relative to the nucleic acid encoding the GBA1 protein and an ITR positioned 3′ relative to the nucleic acid encoding the GBA1 protein.
[0149] 74. The viral genome of any one of embodiments 70-73, wherein the ITR comprises a nucleic acid sequence of SEQ ID NO: 1829, 1830, or 1862, or a nucleotide sequence at least 95% identical thereto.
[0150] 75. The viral genome of any one of embodiments 70-74, wherein the ITR comprises the nucleotide sequence of SEQ ID NO: 1860 and/or 1861, or a nucleotide sequence having at least one, two, or three modifications, but no more than four modifications of SEQ ID NO: 1860 and/or 1861.
[0151] 76. The viral genome of any one of embodiments 70-75, wherein the ITR is positioned 5′ relative to the nucleic acid encoding the GBA1 protein and comprises the nucleotide sequence of SEQ ID NO: 1860 and/or 1861, or a nucleotide sequence having at least one, two, or three modifications, but no more than four modifications of SEQ ID NO: 1860 or 1861.
[0152] 77. The viral genome of any one of embodiments 70-76, wherein the ITR is positioned 3′ relative to the nucleic acid encoding the GBA1 protein and comprises the nucleotide sequence of SEQ ID NO: 1860 or 1861, or a nucleotide sequence having at least one, two, or three modifications, but no more than four modifications of SEQ ID NO: 1860 and/or 1861.
[0153] 78. The viral genome of any one of embodiments 70-77, wherein:
   [0154] (i) the ITR positioned 5′ relative to the nucleic acid encoding the GBA1 protein comprises the nucleotide sequence of SEQ ID NO: 1829, or a nucleotide sequence at least 95% identical thereto; and/or
   [0155] (ii) the ITR positioned 3′ relative to the nucleic acid encoding the GBA1 protein comprises the nucleotide sequence of SEQ ID NO: 1830, or a nucleotide sequence at least 95% identical thereto.
[0156] 79. The viral genome of any one of embodiments 7-78, which further comprises a polyadenylation (polyA) signal region.
[0157] 80. The viral genome of embodiment 79, wherein the polyA signal region comprises the nucleotide sequence of SEQ ID NO: 1846, or a nucleotide sequence at least 95% identical thereto.
[0158] 81. The viral genome of any one of embodiments 7-80, which further comprises an intron region.
[0159] 82. The viral genome of embodiment 81, wherein the intron comprises a beta-globin intron.
[0160] 83. The viral genome of embodiment 81 or 82, wherein the intron comprises the nucleotide sequence of SEQ ID NO: 1842, or a nucleotide sequence at least 95% identical thereto.
[0161] 84. The viral genome of any one of embodiments 7-83, which further comprises an exon region, e.g., at least one, two, or three exon regions.
[0162] 85. The viral genome of any one of embodiments 7-84, which further comprises a Kozak sequence.
[0163] 86. The viral genome of any one of embodiments 7-85, which further comprises a nucleotide sequence encoding a miRNA (miR) binding site, e.g., a miR binding site that modulates, e.g., reduces, expression of the GBA1 protein encoded by the viral genome in a cell or tissue where the corresponding miRNA is expressed.
[0164] 87. The viral genome of embodiment 86, wherein the encoded miR binding site is fully or partially complementary to a miRNA expressed in a cell or tissue of the DRG, liver, hematopoietic, or a combination thereof.
[0165] 88. The viral genome of embodiment 87, wherein the encoded miR binding site modulates, e.g., reduces, expression of the encoded GBA1 protein in a cell or tissue of the DRG, liver, hematopoietic lineage, or a combination thereof.
[0166] 89. The viral genome of any one of embodiments 86-88, which comprises at least 1, 2, 3, 4, or 5 copies of the nucleotide sequence encoding the miR binding site.
[0167] 90. The viral genome of any one of embodiments 86-89, which comprises at least 4 copies of the nucleotide sequence encoding the miR binding site, optionally wherein all four copies encode the same miR binding site.
[0168] 91. The viral genome of embodiment 90, wherein the 4 copies of the nucleic acid encoding the miR binding site are continuous.
[0169] 92. The viral genome of embodiment 90, wherein the 4 copies of the nucleic acid encoding the miR binding site are separated by a spacer.
[0170] 93. The viral genome of embodiment 92, wherein the spacer comprises the nucleotide sequence of SEQ ID NO: 1848, or a nucleotide sequence having at least one, two, or three modifications, but no more than four modifications of SEQ ID NO: 1848.
[0171] 94. The viral genome of any one of embodiments 86-93, wherein the encoded miR binding site comprises a miR183 binding site, a miR122 binding site, a miR-142-3p, or a combination thereof, optionally wherein:
   [0172] (i) the encoded miR183 binding site comprises the nucleotide sequence of SEQ ID NO: 1847, or a nucleotide sequence substantially identical (e.g., having at least 70%, 75%, 80%, 85%, 90%, 92%, 95%, 97%, 98%, or 99% sequence identity, e.g., 100% sequence identity) thereto; or a nucleotide sequence having at least one, two, three, four, five, six, or seven modifications, but no more than ten modifications of SEQ ID NO: 1847;
   [0173] (ii) the encoded miR122 binding site comprises the nucleotide sequence of SEQ ID NO: 1865, or a nucleotide sequence substantially identical (e.g., having at least 70%, 75%, 80%, 85%, 90%, 92%, 95%, 97%, 98%, or 99% sequence identity, e.g., 100% sequence identity) thereto; or a nucleotide sequence having at least one, two, three, four, five, six, or seven modifications, but no more than ten modifications of SEQ ID NO: 1865; and/or
   [0174] (iii) the encoded miR-142-3p binding site comprises the nucleotide sequence of SEQ ID NO: 1869, or a nucleotide sequence substantially identical (e.g., having at least 70%, 75%, 80%, 85%, 90%, 92%, 95%, 97%, 98%, or 99% sequence identity, e.g., 100% sequence identity) thereto; or a nucleotide sequence having at least one, two, three, four, five, six, or seven modifications, but no more than ten modifications of SEQ ID NO: 1869.
[0175] 95. The viral genome of any one of embodiments 86-94, wherein the viral genome comprises a nucleotide sequence encoding a miR183 binding site.
[0176] 96. The viral genome of embodiment 95, wherein the viral genome encodes at least 1-5 copies, e.g., 4 copies of a miR183 binding site.
[0177] 97. The viral genome of embodiment 96, wherein each copy is continuous.
[0178] 98. The viral genome of embodiment 96, wherein each copy is separated by a spacer.
[0179] 99. The viral genome of any one of embodiments 95-98, wherein the encoded miR183 binding site comprises the nucleotide sequence of SEQ ID NO: 1847, or a nucleotide sequence substantially identical (e.g., having at least 70%, 75%, 80%, 85%, 90%, 92%, 95%, 97%, 98%, or 99% sequence identity, e.g., 100% sequence identity) thereto; or a nucleotide sequence having at least one, two, three, four, five, six, or seven modifications, but no more than ten modifications of SEQ ID NO: 1847.
[0180] 100. The viral genome of embodiment 98, wherein the viral genome comprises:
   [0181] (i) a first encoded miR183 binding site comprising the nucleotide sequence of SEQ ID NO: 1847, or a nucleotide sequence substantially identical (e.g., having at least 70%, 75%, 80%, 85%, 90%, 92%, 95%, 97%, 98%, or 99% sequence identity, e.g., 100% sequence identity) thereto; or a nucleotide sequence having at least one, two, three, four, five, six, or seven modifications, but no more than ten modifications of SEQ ID NO: 1847;
   [0182] (ii) a first spacer sequence comprising the nucleotide sequence of SEQ ID NO: 1848, or a nucleotide sequence having at least one, two, or three modifications, but no more than four modifications of SEQ ID NO: 1848;
   [0183] (iii) a second encoded miR183 binding site comprising the nucleotide sequence of SEQ ID NO: 1847, or a nucleotide sequence substantially identical (e.g., having at least 70%, 75%, 80%, 85%, 90%, 92%, 95%, 97%, 98%, or 99% sequence identity, e.g., 100% sequence identity) thereto; or a nucleotide sequence having at least one, two, three, four, five, six, or seven modifications, but no more than ten modifications of SEQ ID NO: 1847;
   [0184] (iv) a second spacer sequence comprising the nucleotide sequence of SEQ ID NO: 1848, or a nucleotide sequence having at least one, two, or three modifications, but no more than four modifications of SEQ ID NO: 1848;
   [0185] (v) a third encoded miR183 binding site comprising the nucleotide sequence of SEQ ID NO: 1847, or a nucleotide sequence substantially identical (e.g., having at least 70%, 75%, 80%, 85%, 90%, 92%, 95%, 97%, 98%, or 99% sequence identity, e.g., 100% sequence identity) thereto; or a nucleotide sequence having at least one, two, three, four, five, six, or seven modifications, but no more than ten modifications of SEQ ID NO: 1847;
   [0186] (vi) a third spacer sequence comprising the nucleotide sequence of SEQ ID NO: 1848, or a nucleotide sequence having at least one, two, or three modifications, but no more than four modifications of SEQ ID NO: 1848; and
   [0187] (vii) a fourth encoded miR183 binding site comprising the nucleotide sequence of SEQ ID NO: 1847, or a nucleotide sequence substantially identical (e.g., having at least 70%, 75%, 80%, 85%, 90%, 92%, 95%, 97%, 98%, or 99% sequence identity, e.g., 100% sequence identity) thereto; or a nucleotide sequence having at least one, two, three, four, five, six, or seven modifications, but no more than ten modifications of SEQ ID NO: 1847.
[0188] 101. The viral genome of any one of embodiments 7-100, which comprises a miR183 binding site series, which comprises four copies of a miR183 binding site, wherein each copy of the miR binding site in the series is separated by a spacer.
[0189] 102. The viral genome of embodiment 101, wherein the encoded miR183 binding site series comprises the nucleotide sequence of SEQ ID NO: 1849, or a nucleotide sequence at least 95% identical thereto.
[0190] 103. The viral genome of embodiment 102, wherein the encoded miR183 binding site series comprises or consists of the nucleotide sequence of SEQ ID NO: 1849.
[0191] 104. The viral genome of any one of embodiments 7-103, which is self-complementary.
[0192] 105. The viral genome of any one of embodiments 7-103, which is single-stranded.
[0193] 106. A recombinant viral genome comprising, in 5′ to 3′ order:
   [0194] (i) a 5′ adeno-associated (AAV) ITR, optionally wherein the 5′ AAV ITR comprises the nucleotide sequence of SEQ ID NO: 1829, or a nucleotide sequence at least 95% identical thereto;
   [0195] (ii) a CMVie enhancer, optionally wherein the CMVie enhancer comprises the nucleotide sequence of SEQ ID NO: 1831, or a nucleotide sequence at least 95% identical thereto;
   [0196] (iii) a CB promoter or functional variant thereof, optionally wherein the CB promoter or functional variant thereof comprises the nucleotide sequence of SEQ ID NO: 1834, or a nucleotide sequence at least 95% identical thereto;
   [0197] (iv) an intron, optionally wherein the intron comprises the nucleotide sequence of SEQ ID NO: 1842, or a nucleotide sequence at least 95% identical thereto;
   [0198] (v) a nucleotide sequence encoding a signal sequence, optionally wherein the nucleotide sequence encoding the signal sequence comprises the nucleotide sequence of SEQ ID NO: 2005, or a nucleotide sequence at least 95% identical thereto;
   [0199] (vi) a nucleotide sequence encoding a GBA1 protein, wherein the nucleotide sequence encoding the GBA1 protein comprises the nucleotide sequence of SEQ ID NO: 2002 or a nucleotide sequence at least 93% identical to the nucleotide sequence of SEQ ID NO: 2002;
   [0200] (vii) a polyA signal region, optionally wherein the polyA signal region comprises the nucleotide sequence of SEQ ID NO: 1846, or a nucleotide sequence at least 95% identical thereto; and
   [0201] (viii) a 3′ AAV ITR, optionally wherein the 3′ AAV ITR comprises the nucleotide sequence of SEQ ID NO: 1830, or a nucleotide sequence at least 95% identical thereto.
[0202] 107. The recombinant viral genome of embodiment 106, wherein:
   [0203] (i) the 5′ AAV ITR comprises the nucleotide sequence of SEQ ID NO: 1829, or a nucleotide sequence at least 95% identical thereto;
   [0204] (ii) the CMVie enhancer comprises the nucleotide sequence of SEQ ID NO: 1831, or a nucleotide sequence at least 95% identical thereto;
   [0205] (iii) the CB promoter or functional variant thereof comprises the nucleotide sequence of SEQ ID NO: 1834, or a nucleotide sequence at least 95% identical thereto;
   [0206] (iv) the nucleotide sequence of SEQ ID NO: 1842, or a nucleotide sequence at least 95% identical thereto;
   [0207] (v) the nucleotide sequence encoding the signal sequence comprises the nucleotide sequence of SEQ ID NO: 2005, or a nucleotide sequence at least 95% identical thereto;
   [0208] (vi) the nucleotide sequence encoding the GBA1 protein comprises the nucleotide sequence of SEQ ID NO: 2002 or a nucleotide sequence at least 93% identical to the nucleotide sequence of SEQ ID NO: 2002;
   [0209] (vii) the polyA signal region comprises the nucleotide sequence of SEQ ID NO: 1846, or a nucleotide sequence at least 95% identical thereto; and
   [0210] (viii) the 3′ AAV ITR comprises the nucleotide sequence of SEQ ID NO: 1830, or a nucleotide sequence at least 95% identical thereto
[0211] 108. The recombinant viral genome of embodiment 106 or 107, wherein:
   [0212] (i) the 5′ AAV ITR comprises the nucleotide sequence of SEQ ID NO: 1829;
   [0213] (ii) the CMVie enhancer comprises the nucleotide sequence of SEQ ID NO: 1831;
   [0214] (iii) the CB promoter or functional variant thereof comprises the nucleotide sequence of SEQ ID NO: 1834;
   [0215] (iv) the intron comprises the nucleotide sequence of SEQ ID NO: 1842;
   [0216] (v) the nucleotide sequence encoding the signal sequence comprises the nucleotide sequence of SEQ ID NO: 2005;
   [0217] (vi) the nucleotide sequence encoding the GBA1 protein comprises the nucleotide sequence of SEQ ID NO: 2002;
   [0218] (vii) the polyA signal region comprises the nucleotide sequence of SEQ ID NO: 1846; and
   [0219] (viii) the 3′ AAV ITR comprises the nucleotide sequence of SEQ ID NO: 1830.
[0220] 109. The recombinant viral genome of embodiment 108, comprising the nucleotide sequence of SEQ ID NO: 2006, or a nucleotide sequence at least 97% identical thereto.
[0221] 110. The recombinant viral genome of embodiment 108 or 109, comprising the nucleotide sequence of SEQ ID NO: 2006.
[0222] 111. The recombinant viral genome of embodiment 108 or 109, consisting of the nucleotide sequence of SEQ ID NO: 2006.
[0223] 112. A recombinant viral genome comprising in 5′ to 3′ order:
   [0224] (i) a 5′ adeno-associated (AAV) ITR, optionally wherein the 5′ AAV ITR comprises the nucleotide sequence of SEQ ID NO: 1829, or a nucleotide sequence at least 95% identical thereto;
   [0225] (ii) a CMVie enhancer, optionally wherein the CMVie enhancer comprises the nucleotide sequence of SEQ ID NO: 1831, or a nucleotide sequence at least 95% identical thereto;
   [0226] (iii) a CB promoter or functional variant thereof, optionally wherein the CB promoter or functional variant thereof comprises the nucleotide sequence of SEQ ID NO: 1834, or a nucleotide sequence at least 95% identical thereto;
   [0227] (iv) an intron, optionally wherein the intron comprises the nucleotide sequence of SEQ ID NO: 1842, or a nucleotide sequence at least 95% identical thereto;
   [0228] (v) a nucleotide sequence encoding a signal sequence, optionally wherein the nucleotide sequence encoding the signal sequence comprises the nucleotide sequence of SEQ ID NO: 2005, or a nucleotide sequence at least 95% identical thereto;
   [0229] (vi) a nucleotide sequence encoding a GBA1 protein, optionally wherein the nucleotide sequence encoding the GBA1 protein comprises the nucleotide sequence of SEQ ID NO: 2002 or a nucleotide sequence at least 93% identical to the nucleotide sequence of SEQ ID NO: 2002;
   [0230] (vii) a miR183 binding site series;
   [0231] (viii) a polyA signal region, optionally wherein the polyA signal region comprises the nucleotide sequence of SEQ ID NO: 1846, or a nucleotide sequence at least 95% identical thereto; and
   [0232] (ix) a 3′ AAV ITR, optionally wherein the 3′ AAV ITR comprises the nucleotide sequence of SEQ ID NO: 1830, or a nucleotide sequence at least 95% identical thereto;
   [0233] wherein the miR183 binding site series comprises:
   [0234] (a) a miR183 binding site comprising the nucleotide sequence of SEQ ID NO: 1847, or a nucleotide sequence having at least one, two, three, four, five, six, or seven modifications, but no more than ten modifications of SEQ ID NO: 1847;
   [0235] (b) a spacer sequence comprising the nucleotide sequence of SEQ ID NO: 1848, or a nucleotide sequence having at least one, two, or three modifications, but no more than four modifications of SEQ ID NO: 1848;
   [0236] (c) a miR183 binding site comprising the nucleotide sequence of SEQ ID NO: 1847, or a nucleotide sequence having at least one, two, three, four, five, six, or seven modifications, but no more than ten modifications of SEQ ID NO: 1847;
   [0237] (d) a spacer sequence comprising the nucleotide sequence of SEQ ID NO: 1848, or a nucleotide sequence having at least one, two, or three modifications, but no more than four modifications of SEQ ID NO: 1848;
   [0238] (e) a miR183 binding site comprising the nucleotide sequence of SEQ ID NO: 1847, or a nucleotide sequence having at least one, two, three, four, five, six, or seven modifications, but no more than ten modifications of SEQ ID NO: 1847;
   [0239] (f) a spacer sequence comprising the nucleotide sequence of SEQ ID NO: 1848, or a nucleotide sequence having at least one, two, or three modifications, but no more than four modifications of SEQ ID NO: 1848;
   [0240] (g) a miR183 binding site comprising the nucleotide sequence of SEQ ID NO: 1847, or a nucleotide sequence having at least one, two, three, four, five, six, or seven modifications, but no more than ten modifications of SEQ ID NO: 1847.
[0241] 113. The recombinant viral genome of embodiment 112,
   [0242] (i) the 5′ AAV ITR comprises the nucleotide sequence of SEQ ID NO: 1829, or a nucleotide sequence at least 95% identical thereto;
   [0243] (ii) the CMVie enhancer comprises the nucleotide sequence of SEQ ID NO: 1831, or a nucleotide sequence at least 95% identical thereto;
   [0244] (iii) the CB promoter or functional variant thereof comprises the nucleotide sequence of SEQ ID NO: 1834, or a nucleotide sequence at least 95% identical thereto;
   [0245] (iv) the nucleotide sequence of SEQ ID NO: 1842, or a nucleotide sequence at least 95% identical thereto;
   [0246] (v) the nucleotide sequence encoding the signal sequence comprises the nucleotide sequence of SEQ ID NO: 2005, or a nucleotide sequence at least 95% identical thereto;
   [0247] (vi) the nucleotide sequence encoding the GBA1 protein comprises the nucleotide sequence of SEQ ID NO: 2002 or a nucleotide sequence at least 93% identical to the nucleotide sequence of SEQ ID NO: 2002;
   [0248] (vii) the miR183 binding site series comprises:
   [0249] (a) a miR183 binding site comprising the nucleotide sequence of SEQ ID NO: 1847, or a nucleotide sequence having at least one, two, three, four, five, six, or seven modifications, but no more than ten modifications of SEQ ID NO: 1847;
      [0250] (b) a spacer sequence comprising the nucleotide sequence of SEQ ID NO: 1848, or a nucleotide sequence having at least one, two, or three modifications, but no more than four modifications of SEQ ID NO: 1848;
      [0251] (c) a miR183 binding site comprising the nucleotide sequence of SEQ ID NO: 1847, or a nucleotide sequence having at least one, two, three, four, five, six, or seven modifications, but no more than ten modifications of SEQ ID NO: 1847;
      [0252] (d) a spacer sequence comprising the nucleotide sequence of SEQ ID NO: 1848, or a nucleotide sequence having at least one, two, or three modifications, but no more than four modifications of SEQ ID NO: 1848;
      [0253] (e) a miR183 binding site comprising the nucleotide sequence of SEQ ID NO: 1847, or a nucleotide sequence having at least one, two, three, four, five, six, or seven modifications, but no more than ten modifications of SEQ ID NO: 1847;
      [0254] (f) a spacer sequence comprising the nucleotide sequence of SEQ ID NO: 1848, or a nucleotide sequence having at least one, two, or three modifications, but no more than four modifications of SEQ ID NO: 1848;
      [0255] (g) a miR183 binding site comprising the nucleotide sequence of SEQ ID NO: 1847, or a nucleotide sequence having at least one, two, three, four, five, six, or seven modifications, but no more than ten modifications of SEQ ID NO: 1847;
   [0256] (viii) the polyA signal region comprises the nucleotide sequence of SEQ ID NO: 1846, or a nucleotide sequence at least 95% identical thereto; and
   [0257] (ix) the 3′ AAV ITR comprises the nucleotide sequence of SEQ ID NO: 1830, or a nucleotide sequence at least 95% identical thereto.
[0258] 114. The recombinant viral genome of embodiment 106, 107, 112, or 113, wherein the nucleotide sequence encoding a GBA1 protein comprises the nucleotide sequence of SEQ ID NO: 2002, or a nucleotide sequence at least 95% identical thereto.
[0259] 115. The recombinant viral genome of embodiment 113 or 114, wherein:
   [0260] (i) the 5′ AAV ITR comprises the nucleotide sequence of SEQ ID NO: 1829;
   [0261] (ii) the CMVie enhancer comprises the nucleotide sequence of SEQ ID NO: 1831;
   [0262] (iii) the CB promoter or functional variant thereof comprises the nucleotide sequence of SEQ ID NO: 1834;
   [0263] (iv) the intron comprises the nucleotide sequence of SEQ ID NO: 1842;
   [0264] (v) the nucleotide sequence encoding the signal sequence comprises the nucleotide sequence of SEQ ID NO: 2005;
   [0265] (vi) the nucleotide sequence encoding the GBA1 protein comprises the nucleotide sequence of SEQ ID NO: 2002;
   [0266] (vii) the miR183 binding site series comprises the nucleotide sequence of SEQ ID NO: 1849;
   [0267] (viii) the polyA signal region comprises the nucleotide sequence of SEQ ID NO: 1846; and
   [0268] (ix) the 3′ AAV ITR comprises the nucleotide sequence of SEQ ID NO: 1830.
[0269] 116. The recombinant viral genome of embodiment 115, comprising the nucleotide sequence of SEQ ID NO: 2007, or a nucleotide sequence at least 97% identical thereto.
[0270] 117. The recombinant viral genome of embodiment 115 or embodiment 116, comprising or consisting of the nucleotide sequence of SEQ ID NO: 2007.
[0271] 118. The recombinant viral genome of any one of embodiments 7-117, which further comprises a nucleic acid encoding a capsid protein, wherein the capsid protein comprises a VP1 polypeptide, a VP2 polypeptide, and/or a VP3 polypeptide.
[0272] 119. The recombinant viral genome of embodiment 118, wherein the VP1 polypeptide, the VP2 polypeptide, and/or the VP3 polypeptide are encoded by at least one Cap gene.
[0273] 120. The viral genome of any one of embodiments 7-119, which further comprises a nucleic acid encoding a Rep protein, wherein the Rep protein comprises a Rep78 protein, a Rep68, Rep52 protein, and/or a Rep40 protein.
[0274] 121. The viral genome of embodiment 120, wherein the Rep78 protein, the Rep68 protein, the Rep52 protein, and/or the Rep40 protein are encoded by at least one Rep gene.
[0275] 122. An AAV particle comprising:
   [0276] (i) a capsid protein; and
   [0277] (ii) the viral genome of any one of embodiments 7-121.
[0278] 123. The AAV particle of embodiment 122, wherein:
   [0279] (i) the capsid protein comprises the amino acid sequence of SEQ ID NO: 138, or an amino acid sequence with at least 80% (e.g., at least about 85, 90, 95, 96, 97, 98, or 99%) sequence identity thereto;
   [0280] (ii) the capsid protein comprises an amino acid sequence having at least one, two or three modifications but not more than 30, 20 or 10 modifications of the amino acid sequence of SEQ ID NO: 138;
   [0281] (iii) the capsid protein comprises the amino acid sequence of SEQ ID NO: 11, or an amino acid sequence with at least 80% (e.g., at least about 85, 90, 95, 96, 97, 98, or 99%) sequence identity thereto;
   [0282] (iv) the capsid protein comprises an amino acid sequence having at least one, two or three modifications but not more than 30, 20 or 10 modifications of the amino acid sequence of SEQ ID NO: 11;
   [0283] (v) the capsid protein comprises an amino acid sequence encoded by the nucleotide sequence of SEQ ID NO: 137, or a sequence with at least 80% (e.g., at least about 85, 90, 95, 96, 97, 98, or 99%) sequence identity thereto; and/or
   [0284] (vi) the nucleotide sequence encoding the capsid protein comprises the nucleotide sequence of SEQ ID NO: 137, or a sequence with at least 80% (e.g., at least about 85, 90, 95, 96, 97, 98, or 99%) sequence identity thereto.
[0285] 124. The AAV particle of embodiment 122 or 123, wherein the capsid protein comprises:
   [0286] (i) an amino acid substitution at position K449, e.g., a K449R substitution, numbered according to SEQ ID NO:138;
   [0287] (ii) an insert comprising the amino acid sequence of TLAVPFK (SEQ ID NO: 1262), optionally wherein the insert is present immediately subsequent to position 588, relative to a reference sequence numbered according to SEQ ID NO:138;
   [0288] (iii) an amino acid other than “A” at position 587 and/or an amino acid other than “Q” at position 588, numbered according to SEQ ID NO: 138;
   [0289] (iv) the amino acid substitution of A587D and/or Q588G, numbered according to SEQ ID NO: 138.
[0290] 125. The AAV particle of any one of embodiments 122-124, wherein the capsid protein comprises (i) the amino acid substitution of K449R numbered according to SEQ ID NO:138; and (ii) an insert comprising the amino acid sequence of TLAVPFK (SEQ ID NO: 1262), optionally wherein the insert is present immediately subsequent to position 588 of SEQ ID NO: 138.
[0291] 126. The AAV particle of any one of embodiments 122-124, wherein the capsid protein comprises (i) the amino acid substitution of K449R numbered according to SEQ ID NO:138; (ii) an insert comprising the amino acid sequence of TLAVPFK (SEQ ID NO: 1262), optionally wherein the insert is present immediately subsequent to position 588, relative to a reference sequence numbered according to SEQ ID NO:138; and (iii) the amino acid substitutions of A587D and Q588G, numbered according to SEQ ID NO:138.
[0292] 127. The AAV particle of any one of embodiments 122-124, wherein the capsid protein comprises (i) an insert comprising the amino acid sequence of TLAVPFK (SEQ ID NO: 1262), optionally wherein the insert is present immediately subsequent to position 588, relative to a reference sequence numbered according to SEQ ID NO:138; and (ii) the amino acid substitutions of A587D and Q588G, numbered according to SEQ ID NO:138.
[0293] 128. The AAV particle of any one of embodiments 122-127, wherein the capsid protein comprises any of the capsid proteins listed in Table 1 or a functional variant thereof.
[0294] 129. The AAV particle of any one of embodiments 122-128, wherein the capsid protein comprises a VOY101, VOY201, AAVPHP.N (PHP.N), AAVPHP.B (PHP.B), AAVPHP.A (PHP.A), PHP.B2, PHP.B3, G2B4, G2B5, AAV5, AAV9, AAVrh10, or a functional variant thereof (e.g., an AAV9 capsid or variant thereof or an AAV5 capsid or a variant thereof).
[0295] 130. The AAV particle of any one of embodiments 122-129, wherein:
   [0296] (i) the capsid protein comprises the amino acid sequence of SEQ ID NO: 1, or an amino acid sequence substantially identical (e.g., having at least 70%, 75%, 80%, 85%, 90%, 92%, 95%, 97%, 98%, or 99% sequence identity) thereto;
   [0297] (ii) the capsid protein comprises an amino acid sequence comprising at least one, two, or three modifications but no more than 30, 20, or 10 modifications, e.g., substitutions, relative to the amino acid sequence of SEQ ID NO: 1;
   [0298] (iii) the capsid protein comprises an amino acid sequence encoded by the nucleotide sequence of SEQ ID NO: 2 or a nucleotide sequence substantially identical (e.g., having at least 70%, 75%, 80%, 85%, 90%, 92%, 95%, 97%, 98%, or 99% sequence identity) thereto; and/or
   [0299] (iv) the nucleotide sequence encoding the capsid protein comprises the nucleotide sequence of SEQ ID NO: 2, or a nucleotide sequence substantially identical (e.g., having at least 70%, 75%, 80%, 85%, 90%, 92%, 95%, 97%, 98%, or 99% sequence identity) thereto.
[0300] 131. The AAV particle of any one of embodiments 122-130, wherein the capsid protein comprises:
   [0301] (i) a VP1 polypeptide, VP2 polypeptide, VP3 polypeptide, or a combination thereof;
   [0302] (ii) the amino acid sequence corresponding to positions 138-743, e.g., a VP2, of SEQ ID NO: 1, or a sequence with at least 80% (e.g., at least about 85, 90, 92, 95, 96, 97, 98, or 99%) sequence identity thereto;
   [0303] (iii) the amino acid sequence corresponding to positions 203-743, e.g., a VP3, of SEQ ID NO: 1, or a sequence with at least 80% (e.g., at least about 85, 90, 92, 95, 96, 97, 98, or 99%) sequence identity thereto; and/or
   [0304] (iv) the amino acid sequence corresponding to positions 1-743, e.g., a VP1, of SEQ ID NO: 1, or a sequence with at least 80% (e.g., at least about 85, 90, 92, 95, 96, 97, 98, or 99%) sequence identity thereto.
[0305] 132. The AAV particle of any one of embodiments 122-131, wherein the nucleotide sequence encoding the capsid protein comprises:
   [0306] (i) a CTG initiation codon; and/or
   [0307] (ii) the nucleotide sequence of SEQ ID NO: 137 which comprises 3-20 mutations, e.g., substitutions, e.g., 3-15 mutations, 3-10 mutations, 3-5 mutations, 5-20 mutations, 5-15 mutations, 5-10 mutations, 10-20 mutations, 10-15 mutations, 15-20 mutations, 3 mutations, 5 mutations, 10 mutations, 12 mutations, 15 mutations, 18 mutations, or 20 mutations.
[0308] 133. A vector comprising the isolated nucleic acid of any one of embodiments 1-6 or the viral genome of any one of embodiments 7-121.
[0309] 134. A cell comprising the viral genome of any one of embodiments 7-11, the viral particle of any one of embodiments 122-132, or the vector of embodiment 133.
[0310] 135. The cell of embodiment 134, which a mammalian cell (e.g., an HEK293 cell), an insect cell (e.g., an Sf9 cell), or a bacterial cell.
[0311] 136. A nucleic acid comprising the viral genome of any one of embodiments 7-121, and a backbone region suitable for replication of the viral genome in a cell, e.g., a bacterial cell (e.g., wherein the backbone region comprises one or both of a bacterial origin of replication and a selectable marker).
[0312] 137. The nucleic acid of embodiment 136, wherein the viral genome comprises a nucleotide sequence of SEQ ID NO: 2006 or SEQ ID NO: 2007, or a sequence at least 97% identical thereto.
[0313] 138. A method of making a viral genome, the method comprising:
   [0314] (i) providing the nucleic acid molecule comprising the viral genome embodiment 136 or 137, or a nucleic acid encoding the viral genome of any one of embodiments 7-121; and
   [0315] (ii) excising the viral genome from the backbone region, e.g., by cleaving the nucleic acid molecule upstream and downstream of the viral genome.
[0316] 139. A method of making a recombinant AAV particle, the method comprising
   [0317] (i) providing a host cell comprising the viral genome of any one of embodiments 7-122 or the nucleic acid encoding the viral genome of embodiment 136 or 137; and
   [0318] (ii) incubating the host cell under conditions suitable to enclose the viral genome in a capsid protein, e.g., a VOY101 capsid protein, an AAV9 capsid protein or variant thereof, or an AAV5 capsid protein or variant thereof;
   [0319] thereby making the isolated AAV particle.
[0320] 140. The method of embodiment 139, further comprising, prior to step (i), introducing a first nucleic acid molecule comprising the viral genome into the host cell.
[0321] 141. The method of embodiment 139 or 140, wherein the host cell comprises a second nucleic acid encoding a capsid protein, e.g., a VOY101 capsid protein.
[0322] 142. The method of embodiment 140, further comprising introducing the second nucleic acid into the cell.
[0323] 143. The method of embodiment 141 or 142, wherein the second nucleic acid molecule is introduced into the host cell prior to, concurrently with, or after the first nucleic acid molecule.
[0324] 144. The method of any one of embodiments 139-143, wherein the host cell comprises a mammalian cell (e.g., an HEK293 cell), an insect cell (e.g., an Sf9 cell), or a bacterial cell.
[0325] 145. A pharmaceutical composition comprising the AAV particle of any one of embodiments 122-132, or an AAV particle comprising the viral genome of any one of embodiments 7-121, and a pharmaceutically acceptable excipient.
[0326] 146. A method of delivering a nucleic acid sequence encoding a GBA1 protein to a subject, comprising administering an effective amount of the pharmaceutical composition of embodiment 145, the AAV particle of any one of embodiments 122-132, an AAV particle comprising the viral genome of any one of embodiments 7-121, or an AAV particle comprising a viral genome comprising the nucleic acid of any one of embodiments 1-6, thereby delivering the nucleic acid encoding a GBA1 protein to the subject.
[0327] 147. The method of embodiment 146, wherein the subject has, has been diagnosed with having, or is at risk of having a disease associated with expression of GBA, e.g., aberrant or reduced GBA1 expression, e.g., expression of a GBA1 gene, GBA1 mRNA, and/or GBA1 protein.
[0328] 148. The method of embodiment 146 or 147, wherein the subject has, has been diagnosed with having, or is at risk of having a neurodegenerative or neuromuscular disorder.
[0329] 149. A method of treating a subject having or diagnosed with having a disease associated with GBA1 expression comprising administering an effective amount of the pharmaceutical composition of embodiment 145, the AAV particle of any one of embodiments 122-132, an AAV particle comprising the viral genome of any one of embodiments 7-121, or an AAV particle comprising a viral genome comprising the nucleic acid of any one of embodiments 1-6, thereby treating the disease associated with GBA1 expression in the subject.
[0330] 150. A method of treating a subject having or diagnosed with having a neurodegenerative or neuromuscular disorder, comprising administering an effective amount of the pharmaceutical composition of embodiment 145, the AAV particle of any one of embodiments 122-132, an AAV particle comprising the viral genome of any one of embodiments 7-121, or an AAV particle comprising a viral genome comprising the nucleic acid of any one of embodiments 1-6, thereby treating the neurodegenerative or neuromuscular disorder in the subject.
[0331] 151. The method of any one of embodiments 147-150, wherein the disease associated with expression of GBA1 or the neurodegenerative or neuromuscular disorder comprises Parkinson's Disease (PD), dementia with Lewy Bodies (DLB), Gaucher disease (GD), Spinal muscular atrophy (SMA), Multiple System Atrophy (MSA), or Multiple sclerosis (MS).
[0332] 152. A method of treating a subject having or diagnosed with having Parkinson's Disease (PD) (e.g., PD associated with a mutation in a GBA1 gene) comprising administering an effective amount of the pharmaceutical composition of embodiment 145, the AAV particle of any one of embodiments 122-132, an AAV particle comprising the viral genome of any one of embodiments 7-121, or an AAV particle comprising a viral genome comprising the nucleic acid of any one of embodiments 1-6, thereby treating PD in the subject.
[0333] 153. The method of embodiment 151 or embodiment 152, wherein the subject has one or more mutations in GBA1.
[0334] 154. The method of any one of embodiments 151-153, wherein the PD is an early onset PD (e.g., before 50 years of age) or a juvenile PD (e.g., before 20 years of age).
[0335] 155. The method of embodiment 151-154, wherein the PD is a tremor dominant, postural instability gait difficulty PD (PIGD) or a sporadic PD (e.g., a PD not associated with a mutation).
[0336] 156. A method of treating a subject having or diagnosed with having Gaucher Disease (GD) comprising administering an effective amount of the pharmaceutical composition of embodiment 145, the AAV particle of any one of embodiments 122-132, an AAV particle comprising the viral genome of any one of embodiments 7-121, or an AAV particle comprising a viral genome comprising the nucleic acid of any one of embodiments 1-6, thereby treating GD in the subject.
[0337] 157. The method of embodiment 151 or 156, wherein the GD is neuronopathic GD (e.g., affect a cell or tissue of the CNS, e.g., a cell or tissue of the brain and/or spinal cord), non-neuronopathic GD (e.g., does not affect a cell or tissue of the CNS), or combination thereof.
[0338] 158. The method of any one of embodiments 151 or 156-157, wherein the GD is Type I GD (GD1), Type 2 GD (GD2), or Type 3 GD (GD3).
[0339] 159. The method of embodiment 158, wherein the GD1 is non-neuronopathic GD.
[0340] 160. The method of embodiment 158, wherein the GD2 is a neuronopathic GD.
[0341] 161. The method of any one of embodiments 146-160, wherein the subject has a reduced level of GCase activity as compared to a reference level, when measured by an assay, e.g., an assay as described in Example 7.
[0342] 162. The method of embodiment 161, wherein the reference level comprises the level of GCase activity in a subject that does not have a disease associated with GBA1 expression, a neuromuscular disorder, and/or a neurodegenerative disorder.
[0343] 163. The method of any one of embodiments 149-162, wherein treating comprises prevention or progression of the disease in the subject.
[0344] 164. The method of any one of embodiments 149-162, wherein treating results in amelioration of at least one symptom of the disease associated with GBA1 expression, the neurodegenerative disorder, and/or the neuromuscular disorder in the subject.
[0345] 165. The method of embodiment 164, wherein the symptom of the disease associated with GBA1 expression, the neurodegenerative disorder, and/or the neuromuscular disorder comprises reduced GCase activity, accumulation of glucocerebroside and other glycolipids, e.g., within immune cells (e.g., macrophages), build-up of synuclein aggregates (e.g., Lewy bodies), developmental delay, progressive encephalopathy, progressive dementia, ataxia, myoclonus, oculomotor dysfunction, bulbar palsy, generalized weakness, trembling of a limb, depression, visual hallucinations, cognitive decline, or a combination thereof.
[0346] 166. The method of any one of embodiments 146-165, wherein the subject is a human.
[0347] 167. The method of any one of embodiments 146-166, wherein the subject is a juvenile, e.g., between 6 years of age to 20 years of age.
[0348] 168. The method of any one of embodiments 146-167, wherein the subject is an adult, e.g., above 20 years of age.
[0349] 169. The method of any one of embodiments 146-168, wherein the subject has a mutation in a GBA1 gene, GBA1 mRNA, and/or GBA1 protein.
[0350] 170. The method of any one of embodiments 146-169, wherein the AAV particle is administered to the subject intravenously, intracerebrally, via intrathalamic (ITH) administration, intramuscularly, intrathecally, intracerebroventricularly, via intraparenchymal administration, via focused ultrasound (FUS), e.g., coupled with the intravenous administration of microbubbles (FUS-MB), or MRI-guided FUS coupled with intravenous administration, or via intra-cisterna magna injection (ICM).
[0351] 171. The method of any one of embodiments 146-170, wherein the AAV particle is administered via dual ITH and ICM administration.
[0352] 172. The method of any one of embodiments 146-170, wherein the AAV particle is administered via intravenous injection, optionally wherein the intravenous injection is via focused ultrasound (FUS), e.g., coupled with the intravenous administration of microbubbles (FUS-MB), or MRI-guided FUS coupled with intravenous administration.
[0353] 173. The method of any one of embodiments 146-172, wherein the AAV particle is administered to a cell, tissue, or region of the CNS, e.g., a region of the brain or spinal cord, e.g., the parenchyma, the cortex, substantia nigra, caudate cerebellum, striatum, corpus callosum, cerebellum, brain stem caudate-putamen, thalamus, superior colliculus, the spinal cord, or a combination thereof.
[0354] 174. The method of any one of embodiments 146-173, wherein the AAV particle is administered to a cell, tissue, or region of the periphery, e.g., a lung cell or tissue, a heart cell or tissue, a spleen cell or tissue, a liver cell or tissue, or a combination thereof.
[0355] 175. The method of any one of embodiments 146-174, wherein the AAV particle is administered to the cerebral spinal fluid, the serum, or a combination thereof.
[0356] 176. The method of any one of embodiments 146-175, wherein the AAV particle is administered to at least two tissues, or regions of the CNS, e.g., bilateral administration.
[0357] 177. The method of any one of embodiments 146-176, further comprising performing a blood test, performing an imaging test, collecting a CNS biopsy sample, collecting a tissue biopsy, (e.g., a biopsy of the lung, liver, or spleen), collecting a blood or serum sample, or collecting an aqueous cerebral spinal fluid biopsy.
[0358] 178. The method of any one of embodiments 146-177, which further comprises evaluating, e.g., measuring, the level of GBA1 expression, e.g., GBA1 gene, GBA1 mRNA, and/or GBA1 protein expression, in the subject, e.g., in a cell, tissue, or fluid, of the subject, optionally wherein the level of GBA1 protein is measured by an assay described herein, e.g., an ELISA, a Western blot, or an immunohistochemistry assay.
[0359] 179. The method of embodiment 178, wherein measuring the level of GBA1 expression is performed prior to, during, or subsequent to treatment with the AAV particle.
[0360] 180. The method of embodiment 178 or 179, wherein the cell or tissue is a cell or tissue of the central nervous system (e.g., parenchyma) or a peripheral cell or tissue (e.g., the liver, heart, and/or spleen).
[0361] 181. The method of any one of embodiments 146-180, wherein the administration results in increased level of GBA1 protein expression in a cell or tissue of the subject, relative to reference level, e.g., a subject that has not received treatment, e.g., has not been administered the AAV particle.
[0362] 182. The method of any one of embodiments 146-181, which further comprises evaluating, e.g., measuring, the level of GCase activity in the subject, e.g., in a cell or tissue of the subject, optionally wherein the level of GCase activity is measured by an assay described herein, e.g., assay as described in Example 7.
[0363] 183. The method of any one of embodiments 146-182, wherein the administration results in an increase in at least one, two, or all of:
   [0364] (i) the level of GCase activity in a cell, tissue, (e.g., a cell or tissue of the CNS, e.g., the cortex, striatum, thalamus, cerebellum, and/or brainstem), and/or fluid (e.g., CSF and/or serum), of the subject, optionally wherein the level of GCase activity is increased by at least 2, 3, 4, or 5 fold, as compared to a reference level, e.g., a subject that has not received treatment, e.g., has not been administered the AAV particle;
   [0365] (ii) the level of viral genomes (VG) per cell in a CNS tissue (e.g., the cortex, striatum, thalamus, cerebellum, brainstem, and/or spinal cord) of the subject, optionally wherein the VG level is increased by greater than 50 VGs per cell, as compared to a peripheral tissue, wherein the level of VGs per cell is at least 4-10 fold lower than the levels in the CNS tissue, e.g., as measured by an assay as described herein; and/or
   [0366] (iii) the level of GBA1 mRNA expression in a cell or tissue (e.g. a cell or tissue of the CNS, e.g., the cortex, thalamus, and/or brainstem), optionally wherein the level of GBA1 mRNA is increased by at least 100-1300 fold, e.g., 100 fold, 200 fold, 500 fold, 600 fold, 850 fold, 900 fold, 950 fold, 1000 fold, 1050 fold, 1100 fold, 1150 fold, 1200 fold, 1250 fold, or 1300 fold as compared to a reference level, e.g., a subject that has not received treatment (e.g., has not been administered the AAV particle), or endogenous GBA1 mRNA levels, e.g., as measured by an assay as described herein.
[0367] 184. The method of any one of embodiments 146-183, wherein further comprising administration of an additional therapeutic agent and/or therapy suitable for treatment or prevention of the disease associated GBA1 expression, the neurodegenerative disorder, and/or the neuromuscular disorder.
[0368] 185. The method of embodiment 184, wherein the additional therapeutic agent comprises enzyme replacement therapy (ERT) (e.g., imiglucerase, velaglucerase alfa, or taliglucerase alfa); substrate reduction therapy (SRT) (e.g., eliglustat or miglustat), blood transfusion, levodopa, carbidopa, Safinamide, dopamine agonists (e.g., pramipexole, rotigotine, or ropinirole), anticholinergics (e.g., benztropine or trihexyphenidyl), cholinesterase inhibitors (e.g., rivastigmine, donepezil, or galantamine), an N-methyl-d-aspartate (NMDA) receptor antagonist (e.g., memantine), or a combination thereof.
[0369] 186. The isolated nucleic acid of any one of embodiments 1-6, the viral genome of any one of embodiments 7-121, the AAV particle of any one of embodiments 122-132, or the pharmaceutical composition of embodiment 145 for use in the manufacture of a medicament.
[0370] 187. The isolated nucleic acid of any one of embodiments 1-6, the viral genome of any one of embodiments 7-121, the AAV particle of any one of embodiments 122-132, or the pharmaceutical composition of embodiment 145 or use in the treatment of a disease associated with GBA1 expression, a neuromuscular and/or a neurodegenerative disorder.
[0371] 188. Use of an effective amount of an AAV particle comprising the genome of any one of embodiments 7-121, an AAV particle comprising a genome comprising the nucleic acid of any one of embodiments 1-6, the AAV particle of any one of embodiments 122-132, or the pharmaceutical composition of embodiment 146, in the manufacture of a medicament for the treatment of a disease associated with GBA1 expression, a neuromuscular and/or a neurodegenerative disorder.
[0372] 189. An adeno-associated virus (AAV) viral genome comprising the nucleotide sequence of SEQ ID NO: 2006 or 2007.
[0373] 190. An AAV particle comprising the AAV viral genome of claim 189 and a capsid selected from a group consisting of those listed in Table 1.
[0374] 191. The viral genome of embodiment 190, wherein the capsid comprises an AAV2 serotype, AAV5 serotype, or AAV9 serotype, or a variant thereof.
[0375] 192. A pharmaceutical composition comprising the AAV particle of claim 190 or claim 191.
[0376] 193. A method of treating a neurological or neuromuscular disorder, said method comprising administering to a subject the pharmaceutical composition of claim 192.
[0377] 194. The method of claim 193, wherein the neurological or neuromuscular disorder is Parkinson's Disease, Gaucher disease, or Dementia with Lewy Bodies, or a related disorder.
[0378] 195. The method of claim 194, wherein the neurological or neuromuscular disorder is a disorder associated with decreased GCase protein levels.

[0379] The details of various aspects or embodiments of the present disclosure are set forth below. Other features, objects, and advantages of the disclosure will be apparent from the description and the claims. In the description, the singular forms also include the plural unless the context clearly dictates otherwise. Unless defined otherwise, all technical and scientific terms used herein have the same meaning as commonly understood by one of ordinary skill in the art in the field of this disclosure. In the case of conflict, the present description will control.

### BRIEF DESCRIPTION OF THE DRAWINGS

[0380] FIGS. 1A-1B depict LC-MS/MS results quantifying levels of GBA1 substrate glucosylsphingosine (GlcSph) in cell lysates of Gaucher disease patient derived fibroblasts (GD1 patient GM04394, GD1 Patient GM00852, and GD2 patient GM00877) and healthy control fibroblasts (CLT GM05758, CTL GM02937 and CTL GM08402). Data are shown as GlcSph normalized to actin (FIG. 1A) or normalized to lysosomal protein Lamp1 (FIG. 1B).

[0381] FIG. 1C depicts GBA1 protein levels detected in lysates of Gaucher patient-derived fibroblasts (GD1 and GD2) compared to healthy control fibroblast (HC) by LC-MS/MS. Data are shown as concentration of GBA1 protein (ng) relative to total protein (mg).

[0382] FIGS. 2A-2B depict GCase activity (RFU/mL normalized to mg of protein) in GD-II GM00877 fibroblast cell pellets (FIG. 2A) or conditioned media (FIG. 2B) at Day 7 after transduction with AAV2 viral particles comprising the viral genome construct on the X-axis from left to right: GBA_VG1 (SEQ ID NO: 1759), GBA_VG9 (SEQ ID NO: 1767), GBA_VG10 (SEQ ID NO: 1768), GBA_VG11 (SEQ ID NO: 1769), GBA_VG6 (SEQ ID NO: 1764), GBA_VG7 (SEQ ID NO: 1765), GBA_VG12 (SEQ ID NO: 1770), GBA_VG3 (SEQ ID NO: 1761), GBA_VG4 (SEQ ID NO: 1762), GBA_VG5 (SEQ ID NO: 1763), and GBA_VG13 (SEQ ID NO: 1771), at MOI of 103.5. The dotted line indicates the baseline level (vehicle treatment).

[0383] FIG. 3 depicts levels of GBA1 substrate glucosylsphingosine (GlcSph) in the cell lysates (ng/mg Lamp1) collected from GD-II patient fibroblasts (GM00877) at Day 7 after transduction with transduction of a no AAV control or AAV2 vectors comprising the viral genome indicated on the X-axis (from left to right: GBA_VG1 (SEQ ID NO: 1759), GBA_VG9 (SEQ ID NO: 1767), GBA_VG6 (SEQ ID NO: 1764), GBA_VG7 (SEQ ID NO: 1765), GBA_VG3 (SEQ ID NO: 1761), GBA_VG4 (SEQ ID NO: and GBA_VG5 (SEQ ID NO: 1763)).

[0384] FIG. 4A depicts GCase activity measured as RFU per mL normalized to mg of protein in GD-II patient fibroblasts (GD-II GM00877) on day 7 post-transduction with AAV2 vectors comprising the viral genome indicated on the X-axis (from left to right: GBA_VG1 (SEQ ID NO: 1759), GBA_VG14 (SEQ ID NO: 1809), GBA_VG15 (SEQ ID NO: 1810), GBA_VG16 (SEQ ID NO: 1811), GBA_VG17 (SEQ ID NO: 1812), GBA_VG18 (SEQ ID NO: 1813), GBA_VG19 (SEQ ID NO: 1814), and GBA_VG20 (SEQ ID NO: 1815)) at an MOI of 102.5 (first bar), 103 (second bar), 103.5 and 104 (third bar). FIG. 4B depicts the level of the GBA1 substrate glucosylsphingosine (GlcSph, ng/mg Lamp1) in the cell lysate from GD-II patient-derived fibroblasts at day 7 after transduction with AAV2 vectors comprising the viral genome indicated on the X-axis (from left to right: GBA_VG1 (SEQ ID NO: 1759), GBA_VG14 (SEQ ID NO: 1809), GBA_VG15 (SEQ ID NO: 1810), GBA_VG16 (SEQ ID NO: 1811), GBA_VG17 (SEQ ID NO: 1812), GBA_VG18 (SEQ ID NO: 1813), GBA_VG19 (SEQ ID NO: 1814), and GBA_VG20 (SEQ ID NO: 1815)) at an MOI of of 102.5 (first bar), 103 (second bar), 103.5 and 104 (third bar).

[0385] FIG. 5 depicts the GC content and distribution of a first codon-optimized nucleotide sequence encoding a GBA1 protein of SEQ ID NO: 1773, a second codon-optimized nucleotide sequence encoding a GBA1 protein of SEQ ID NO: 1781, and a wild-type nucleotide sequence encoding a GBA1 protein of SEQ ID NO: 1777.

[0386] FIGS. 6A-6B compare activity of a GBA1 protein expressed by AAV2 vectorized viral genome constructs: GBA_VG1 (SEQ ID NO: 1759), GBA_VG17 (SEQ ID NO: 1812), and GBA_VG21 (SEQ ID NO: 1816). FIG. 6A depicts the GCase activity (RFU/mL) normalized to mg of protein in GD-II patient fibroblasts treated with AAV2 viral particles at an MOI of 104.5, comprising the viral genome constructs indicated on the X-axis (GBA_VG1 (SEQ ID NO: 1759), GBA_VG17 (SEQ ID NO: 1812), and GBA_VG21 (SEQ ID NO: 1816)) compared to a no AAV control. FIG. 6B depicts glucosylsphingosine (GlcSph) (ng/mL Lamp1) in the cell lysate from GD-II patient fibroblasts treated with AAV2 viral particles comprising the viral genome constructs indicated on the X-axis (from left to right GBA_VG1 (SEQ ID NO: 1759), GBA_VG17 (SEQ ID NO: 1812), and GBA_VG21 (SEQ ID NO: 1816)) at an MOI of 106, or a no AAV treatment control.

[0387] FIG. 7 depicts the GCase activity (RFU/mL) per mg of protein in rat embryonic dorsal root ganglion (DRG) neurons transduced an AAV2 vector comprising GBA_VG33 (SEQ ID NO: 1828) or an AAV2 vector comprising GBA_VG17 (SEQ ID NO: 1812) at an MOI of 103.5 or 104.5, compared to a no AAV control.

[0388] FIG. 8 depicts the biodistribution (VG/cell) versus GCase activity (RFU/mL, fold over endogenous GCase activity, normalized to mg of protein) in the cortex, striatum, thalamus, brainstem, cerebellum, and liver in wild-type mice at one-month post-IV injection of VOY101.GBA_VG17 (SEQ ID NO: 1812) at 2e13 vg/kg.

[0389] FIG. 9 depicts the biodistribution (VG/cell) in the cortex, striatum, and brainstem of wild-type mice at 28 days post-IV injection of VOY101.GBA_VG17 (SEQ ID NO: 1812), VOY101.GBA_VG35 (SEQ ID NO: 2006) or VOY101.GBA_VG36 (SEQ ID NO: 2007).

[0390] FIG. 10 depicts the GCase activity in the cortex, striatum, and brainstem of wild-type mice at 28 days post-IV injection of VOY101.GBA_VG17 (SEQ ID NO: 1812), VOY101.GBA_VG35 (SEQ ID NO: 2006) or VOY101.GBA_VG36 (SEQ ID NO: 2007).

[0391] FIG. 11 depicts the biodistribution, mRNA expression, and Gcase activities in the brainstem and DRGs of wild-type mice at 28 days post-IV injection of VOY101.GBA_VG17 (SEQ ID NO: 1812), VOY101.GBA_VG35 (SEQ ID NO: 2006) or VOY101.GBA_VG36 (SEQ ID NO: 2007).

[0392] FIG. 12 depicts the substrate quantification of glucosylceramide and glucosylsphingosine by LC-MS/MS in the brainstem, striatum, and DRGs of wild-type mice at 28 days post-IV injection of VOY101.GBA_VG17 (SEQ ID NO: 1812), VOY101.GBA_VG35 (SEQ ID NO: 2006) or VOY101.GBA_VG36 (SEQ ID NO: 2007).

[0393] FIG. 13 depicts biodistribution (VG/cell) in the cortex and GCase activities in the cortex, striatum, and brainstem of wild-type mice at 28 days post-IV injection of VOY101.GBA_VG17 (SEQ ID NO: 1812) or VOY101.GBA_VG17-HA.

[0394] FIG. 14A depicts immunohistochemical analysis of HA expression in the cortex, striatum, and brainstem of wild-type mice at 28 days post-IV injection of VOY101.GBA_VG17 (SEQ ID NO: 1812) or VOY101.GBA_VG17-HA. FIG. 14B depicts immunohistochemical analysis of HA expression in the cerebellum, thalamus, and hippocampus of wild-type mice at 28 days post-IV injection of VOY101.GBA_VG17 (SEQ ID NO: 1812) or VOY101.GBA_VG17-HA.

### DETAILED DESCRIPTION

### Overview

[0395] Described herein, inter alia, are compositions comprising isolated, e.g., recombinant, viral particles, e.g., AAV particles, for delivery, e.g., vectorized delivery, of a protein, e.g., a GBA1 protein, and methods of making and using the same. Adeno-associated viruses (AAV) are small non-enveloped icosahedral capsid viruses of the Parvoviridae family characterized by a single stranded DNA viral genome. Parvoviridae family viruses consist of two subfamilies: Parvovirinae, which infect vertebrates, and Densovirinae, which infect invertebrates. The Parvoviridae family includes the Dependovirus genus which includes AAV, capable of replication in vertebrate hosts including, but not limited to, human, primate, bovine, canine, equine, and ovine species.

[0396] The parvoviruses and other members of the Parvoviridae family are generally described in Kenneth I. Berns, “Parvoviridae: The Viruses and Their Replication,” Chapter 69 in Fields Virology (3d Ed. 1996), the contents of which are incorporated by reference in their entirety.

[0397] AAV have proven to be useful as a biological tool due to their relatively simple structure, their ability to infect a wide range of cells (including quiescent and dividing cells) without integration into the host genome and without replicating, and their relatively benign immunogenic profile. The genome of the virus may be manipulated to contain a minimum of components for the assembly of a functional recombinant virus, or viral particle, which is loaded with or engineered to target a particular tissue and express or deliver a desired payload. The genome of the virus may be modified to contain a minimum of components for the assembly of a functional recombinant virus, or viral particle, which is loaded with or engineered to express or deliver a desired nucleic acid construct or payload, e.g., a transgene, polypeptide-encoding polynucleotide, e.g., a GBA1 protein, e.g., a GCase, GCase and PSAP, GCase and SapA, or GCase and SapC, GCase and a cell penetration peptide (e.g., an ApoEII peptide, a TAT peptide, or an ApoB peptide), or GCase and a lysosomal targeting sequence (LTS), which may be delivered to a target cell, tissue, or organism. In some embodiments, the genome encodes a wildtype GBA1 protein. In some embodiments, the genome comprises a codon-optimized, CpG-reduced (e.g., CpG-depleted) nucleotide sequence encoding a wildtype GBA1 protein, e.g., as compared to a wildtype GBA1 encoding sequence (e.g., comprising the nucleotide sequence of SEQ ID NO: 1776 or 1777). In some embodiments, the target cell is a CNS cell. In some embodiments, the target tissue is a CNS tissue. The target CNS tissue may be brain tissue. In some embodiments, the brain target comprises caudate, putamen, thalamus, superior colliculus, cortex, and corpus collosum.

[0398] Gene therapy presents an alternative approach for Parkinson's Disease (PD) and related diseases sharing single-gene etiology, such as Gaucher disease and Dementia with Lewy Bodies and related disorders. AAVs are commonly used in gene therapy approaches as a result of a number of advantageous features. Without wishing to be bound by theory, it is believed in some embodiments, that expression vectors, e.g., an adeno-associated viral vector (AAVs) or AAV particle, e.g., an AAV particle described herein, can be used to administer and/or deliver a GBA1 protein (e.g., GCase and related proteins), in order to achieve sustained, high concentrations, allowing for longer lasting efficacy, fewer dose treatments, broad biodistribution, and/or more consistent levels of the GBA1 protein, relative to a non-AAV therapy.

[0399] As demonstrated in the Examples herein below, the compositions and methods described herein provides improved features compared to prior enzyme replacement approaches, including (i) increased GCase activity in a cell, tissue, (e.g., a cell or tissue of the CNS, e.g., the cortex, striatum, thalamus, cerebellum, and/or brainstem), and/or fluid (e.g., CSF and/or serum), of the subject; (ii) increased biodistribution throughout the CNS (e.g., the cortex, striatum, thalamus, cerebellum, brainstem, and/or spinal cord), and the periphery (e.g., the liver), and/or (iii) elevated payload expression, e.g., GBA1 mRNA expression, in multiple brain regions (e.g., cortex, thalamus, and brain stem) and the periphery (e.g., the liver). In some embodiments, an AAV viral genome comprising a codon-optimized, CpG-reduced (e.g., CpG-depleted) nucleotide sequence encoding a GBA1 protein (e.g., SEQ ID NO: 2001 or SEQ ID NO: 2002) results in high biodistribution in the CNS; increased GCase activity in the CNS, peripheral tissues, and/or fluid; and successful transgene transcription and expression. The compositions and methods described herein can be used in the treatment of disorders associated with a lack of a GBA1 protein and/or GCase activity, such as neuronopathic (affects the CNS) and non-neuronopathic (affects non-CNS) Gaucher's disease (e.g., Type 1 GD, Type 2 GD, or Type 3 GD), a PD associated with a mutation in a GBA1 gene, and a dementia with Lewy Bodies (DLB). In some embodiments, the disclosure provides an AAV viral genome comprising a codon-optimized, CpG-reduced (e.g., CpG-depleted) nucleotide sequence encoding a GBA1 protein (e.g., comprising the nucleotide sequence of SEQ ID NO: 2001 or SEQ ID NO: 2002) that has reduced immunogenicity compared to a codon-optimized sequence comprising one or more or all CpG motifs.

### I. Compositions

### Adeno-Associated Viral (AAV) Vectors

[0400] AAV have a genome of about 5,000 nucleotides in length which contains two open reading frames encoding the proteins responsible for replication (Rep) and the structural protein of the capsid (Cap). The open reading frames are flanked by two Inverted Terminal Repeat (ITR) sequences, which serve as the origin of replication of the viral genome. The wild-type AAV viral genome comprises nucleotide sequences for two open reading frames, one for the four non-structural Rep proteins (Rep78, Rep68, Rep52, Rep40, encoded by Rep genes) and one for the three capsid, or structural, proteins (VP1, VP2, VP3, encoded by capsid genes or Cap genes). The Rep proteins are important for replication and packaging, while the capsid proteins are assembled to create the protein shell of the AAV, or AAV capsid. Alternative splicing and alternate initiation codons and promoters result in the generation of four different Rep proteins from a single open reading frame and the generation of three capsid proteins from a single open reading frame. Though it varies by AAV serotype, as a non-limiting example, for AAV9/hu. 14 (SEQ ID NO: 123 of U.S. Pat. No. 7,906,111, the contents of which are herein incorporated by reference in their entirety) VP1 refers to amino acids 1-736, VP2 refers to amino acids 138-736, and VP3 refers to amino acids 203-736. As another non-limiting example, VP1 refers to amino acids 1-743 numbered according to SEQ ID NO: 1, VP2 refers to amino acids 138-743 numbered according to SEQ ID NO: 1, and VP3 refers to amino acids 203-743 numbered according to SEQ ID NO: 1. In other words, VP1 is the full-length capsid sequence, while VP2 and VP3 are shorter components of the whole. As a result, changes in the sequence in the VP3 region, are also changes to VP1 and VP2, however, the percent difference as compared to the parent sequence will be greatest for VP3 since it is the shortest sequence of the three. Though described here in relation to the amino acid sequence, the nucleic acid sequence encoding these proteins can be similarly described. Together, the three capsid proteins assemble to create the AAV capsid protein. While not wishing to be bound by theory, the AAV capsid protein typically comprises a molar ratio of 1:1:10 of VP1:VP2:VP3. As used herein, an “AAV serotype” is defined primarily by the AAV capsid. In some instances, the ITRs are also specifically described by the AAV serotype (e.g., AAV2/9).

[0401] The AAV vector typically requires a co-helper (e.g., adenovirus) to undergo productive infection in cells. In the absence of such helper functions, the AAV virions essentially enter host cells but do not integrate into the cells' genome.

[0402] AAV vectors have been investigated for delivery of gene therapeutics because of several unique features. Non-limiting examples of the features include (i) the ability to infect both dividing and non-dividing cells; (ii) a broad host range for infectivity, including human cells; (iii) wild-type AAV has not been associated with any disease and has not been shown to replicate in infected cells; (iv) the lack of cell-mediated immune response against the vector, and (v) the non-integrative nature in a host chromosome thereby reducing potential for long-term genetic alterations. Moreover, infection with AAV vectors has minimal influence on changing the pattern of cellular gene expression (Stilwell and Samulski et al., Biotechniques, 2003, 34, 148, the contents of which are herein incorporated by reference in their entirety).

[0403] Typically, AAV vectors for GCase protein delivery may be recombinant viral vectors which are replication defective as they lack sequences encoding functional Rep and Cap proteins within the viral genome. In some cases, the defective AAV vectors may lack most or all coding sequences and essentially only contain one or two AAV ITR sequences and a payload sequence. In certain embodiments, the viral genome encodes GCase protein. In some embodiments, the viral genome encodes GCase protein and SapA protein. In some embodiments, the viral genome encodes GCase protein and SapC protein. For example, the viral genome can encode human GCase, human GCase+SapA, or human GCase+SapC protein(s).

[0404] In some embodiments, the viral genome may comprise one or more lysosomal targeting sequences (LTS).

[0405] In some embodiments, the viral genome may comprise one or more cell penetrating peptide sequences (CPP).

[0406] In some embodiments, a viral genome may comprise one or more lysosomal targeting sequences and one or more cell penetrating sequences.

[0407] In some embodiments, the AAV particles of the present disclosure may be introduced into mammalian cells.

[0408] AAV vectors may be modified to enhance the efficiency of delivery. Such modified AAV vectors of the present disclosure can be packaged efficiently and can be used to successfully infect the target cells at high frequency and with minimal toxicity.

[0409] In other embodiments, AAV particles of the present disclosure may be used to deliver GCase protein to the central nervous system (see, e.g., U.S. Pat. No. 6,180,613; the contents of which are herein incorporated by reference in their entirety) or to specific tissues of the CNS.

[0410] As used herein, the term “AAV vector” or “AAV particle” comprises a capsid and a viral genome comprising a payload. As used herein, “payload” or “payload region” refers to one or more polynucleotides or polynucleotide regions encoded by or within a viral genome or an expression product of such polynucleotide or polynucleotide region, e.g., a transgene, a polynucleotide encoding a polypeptide or multi-polypeptide, e.g., GCase protein.

[0411] It is understood that the compositions described herein may have additional conservative or non-essential amino acid substitutions, which do not have a substantial effect on their functions.

### AAV Serotypes

[0412] AAV particles of the present disclosure may comprise or be derived from any natural or recombinant AAV serotype. According to the present disclosure, the AAV particles may utilize or be based on a serotype or include a peptide selected from any of the following VOY101, VOY201, AAVPHP.B (PHP.B), AAVPHP.A (PHP.A), AAVG2B-26, AAVG2B-13, AAVTH1.1-32, AAVTH1.1-35, AAVPHP.B2 (PHP.B2), AAVPHP.B3 (PHP.B3), AAVPHP.N/PHP.B-DGT, AAVPHP.B-EST, AAVPHP.B-GGT, AAVPHP.B-ATP, AAVPHP.B-ATT-T, AAVPHP.B-DGT-T, AAVPHP.B-GGT-T, AAVPHP.B-SGS, AAVPHP.B-AQP, AAVPHP.B-QQP, AAVPHP.B-SNP (3), AAVPHP.B-SNP, AAVPHP.B-QGT, AAVPHP.B-NQT, AAVPHP.B-EGS, AAVPHP.B-SGN, AAVPHP.B-EGT, AAVPHP.B-DST, AAVPHP.B-DST, AAVPHP.B-STP, AAVPHP.B-PQP, AAVPHP.B-SQP, AAVPHP.B-QLP, AAVPHP.B-TMP, AAVPHP.B-TTP, AAVPHP.S/G2A12, AAVG2A15/G2A3 (G2A3), AAVG2B4 (G2B4), AAVG2B5 (G2B5), PHP.S, AAV1, AAV2, AAV2G9, AAV3, AAV3a, AAV3b, AAV3-3, AAV4, AAV4-4, AAV5, AAV6, AAV6.1, AAV6.2, AAV6.1.2, AAV7, AAV7.2, AAV8, AAV9, AAV9.11, AAV9.13, AAV9.16, AAV9.24, AAV9.45, AAV9.47, AAV9.61, AAV9.68, AAV9.84, AAV9.9, AAV10, AAV11, AAV12, AAV16.3, AAV24.1, AAV27.3, AAV42.12, AAV42-1b, AAV42-2, AAV42-3a, AAV42-3b, AAV42-4, AAV42-5a, AAV42-5b, AAV42-6b, AAV42-8, AAV42-10, AAV42-11, AAV42-12, AAV42-13, AAV42-15, AAV42-aa, AAV43-1, AAV43-12, AAV43-20, AAV43-21, AAV43-23, AAV43-25, AAV43-5, AAV44.1, AAV44.2, AAV44.5, AAV223.1, AAV223.2, AAV223.4, AAV223.5, AAV223.6, AAV223.7, AAV1-7/rh.48, AAV1-8/rh.49, AAV2-15/rh.62, AAV2-3/rh.61, AAV2-4/rh.50, AAV2-5/rh.51, AAV3.1/hu.6, AAV3.1/hu.9, AAV3-9/rh.52, AAV3-11/rh.53, AAV4-8/r11.64, AAV4-9/rh.54, AAV4-19/rh.55, AAV5-3/rh.57, AAV5-22/rh.58, AAV7.3/hu.7, AAV16.8/hu.10, AAV16.12/hu.11, AAV29.3/bb.1, AAV29.5/bb.2, AAV106.1/hu.37, AAV114.3/hu.40, AAV127.2/hu.41, AAV127.5/hu.42, AAV128.3/hu.44, AAV130.4/hu.48, AAV145.1/hu.53, AAV145.5/hu.54, AAV145.6/hu.55, AAV161.10/hu.60, AAV161.6/hu.61, AAV33.12/hu.17, AAV33.4/hu.15, AAV33.8/hu.16, AAV52/hu.19, AAV52.1/hu.20, AAV58.2/hu.25, AAVA3.3, AAVA3.4, AAVA3.5, AAVA3.7, AAVC1, AAVC2, AAVC5, AAV-DJ, AAV-DJ8, AAVF3, AAVF5, AAVH2, AAVrh.72, AAVhu.8, AAVrh.68, AAVrh.70, AAVpi.1, AAVpi.3, AAVpi.2, AAVrh.60, AAVrh.44, AAVrh.65, AAVrh.55, AAVrh.47, AAVrh.69, AAVrh.45, AAVrh.59, AAVhu. 12, AAVH6, AAVLK03, AAVH-1/hu.1, AAVH-5/hu.3, AAVLG-10/rh.40, AAVLG-4/rh.38, AAVLG-9/hu.39, AAVN721-8/rh.43, AAVCh.5, AAVCh.5R1, AAVcy.2, AAVcy.3, AAVcy.4, AAVcy.5, AAVCy.5R1, AAVCy.5R2, AAVCy.5R3, AAVCy.5R4, AAVcy.6, AAVhu.1, AAVhu.2, AAVhu.3, AAVhu.4, AAVhu.5, AAVhu.6, AAVhu.7, AAVhu.9, AAVhu. 10, AAVhu. 11, AAVhu. 13, AAVhu. 15, AAVhu. 16, AAVhu. 17, AAVhu.18, AAVhu.20, AAVhu.21, AAVhu.22, AAVhu.23.2, AAVhu.24, AAVhu.25, AAVhu.27, AAVhu.28, AAVhu.29, AAVhu.29R, AAVhu.31, AAVhu.32, AAVhu.34, AAVhu.35, AAVhu.37, AAVhu.39, AAVhu.40, AAVhu.41, AAVhu.42, AAVhu.43, AAVhu.44, AAVhu.44R1, AAVhu.44R2, AAVhu.44R3, AAVhu.45, AAVhu.46, AAVhu.47, AAVhu.48, AAVhu.48R1, AAVhu.48R2, AAVhu.48R3, AAVhu.49, AAVhu.51, AAVhu.52, AAVhu.54, AAVhu.55, AAVhu.56, AAVhu.57, AAVhu.58, AAVhu.60, AAVhu.61, AAVhu.63, AAVhu.64, AAVhu.66, AAVhu.67, AAVhu. 14/9, AAVhu.t 19, AAVrh.2, AAVrh.2R, AAVrh.8, AAVrh.8R, AAVrh. 10, AAVrh.12, AAVrh. 13, AAVrh. 13R, AAVrh.14, AAVrh. 17, AAVrh.18, AAVrh. 19, AAVrh.20, AAVrh.21, AAVrh.22, AAVrh.23, AAVrh.24, AAVrh.25, AAVrh.31, AAVrh.32, AAVrh.33, AAVrh.34, AAVrh.35, AAVrh.36, AAVrh.37, AAVrh.37R2, AAVrh.38, AAVrh.39, AAVrh.40, AAVrh.46, AAVrh.48, AAVrh.48.1, AAVrh.48.1.2, AAVrh.48.2, AAVrh.49, AAVrh.51, AAVrh.52, AAVrh.53, AAVrh.54, AAVrh.56, AAVrh.57, AAVrh.58, AAVrh.61, AAVrh.64, AAVrh.64R1, AAVrh.64R2, AAVrh.67, AAVrh.73, AAVrh.74, AAVrh8R, AAVrh8R A586R mutant, AAVrh8R R533A mutant, AAAV, BAAV, caprine AAV, bovine AAV, AAVhE1.1, AAVhEr1.5, AAVhER1.14, AAVhEr1.8, AAVhEr1.16, AAVhEr1.18, AAVhEr1.35, AAVhEr1.7, AAVhEr1.36, AAVhEr2.29, AAVhEr2.4, AAVhEr2.16, AAVhEr2.30, AAVhEr2.31, AAVhEr2.36, AAVhER1.23, AAVhEr3.1, AAV2.5T, AAV-PAEC, AAV-LK01, AAV-LK02, AAV-LK03, AAV-LK04, AAV-LK05, AAV-LK06, AAV-LK07, AAV-LK08, AAV-LK09, AAV-LK10, AAV-LK11, AAV-LK12, AAV-LK13, AAV-LK14, AAV-LK15, AAV-LK16, AAV-LK17, AAV-LK18, AAV-LK19, AAV-PAEC2, AAV-PAEC4, AAV-PAEC6, AAV-PAEC7, AAV-PAEC8, AAV-PAEC11, AAV-PAEC12, AAV-2-pre-miRNA-101, AAV-8h, AAV-8b, AAV-h, AAV-b, AAV SM 10-2, AAV Shuffle 100-1, AAV Shuffle 100-3, AAV Shuffle 100-7, AAV Shuffle 10-2, AAV Shuffle 10-6, AAV Shuffle 10-8, AAV Shuffle 100-2, AAV SM 10-1, AAV SM 10-8, AAV SM 100-3, AAV SM 100-10, BNP61 AAV, BNP62 AAV, BNP63 AAV, AAVrh.50, AAVrh.43, AAVrh.62, AAVrh.48, AAVhu. 19, AAVhu.11, AAVhu.53, AAV4-8/rh.64, AAVLG-9/hu.39, AAV54.5/hu.23, AAV54.2/hu.22, AAV54.7/hu.24, AAV54.1/hu.21, AAV54.4R/hu.27, AAV46.2/hu.28, AAV46.6/hu.29, AAV128.1/hu.43, true type AAV (ttAAV), UPENN AAV 10, Japanese AAV 10 serotypes, AAV CBr-7.1, AAV CBr-7.10, AAV CBr-7.2, AAV CBr-7.3, AAV CBr-7.4, AAV CBr-7.5, AAV CBr-7.7, AAV CBr-7.8, AAV CBr-B7.3, AAV CBr-B7.4, AAV CBr-E1, AAV CBr-E2, AAV CBr-E3, AAV CBr-E4, AAV CBr-E5, AAV CBr-e5, AAV CBr-E6, AAV CBr-E7, AAV CBr-E8, AAV CHt-1, AAV CHt-2, AAV CHt-3, AAV CHt-6.1, AAV CHt-6.10, AAV CHt-6.5, AAV CHt-6.6, AAV CHt-6.7, AAV CHt-6.8, AAV CHt-P1, AAV CHt-P2, AAV CHt-P5, AAV CHt-P6, AAV CHt-P8, AAV CHt-P9, AAV CKd-1, AAV CKd-10, AAV CKd-2, AAV CKd-3, AAV CKd-4, AAV CKd-6, AAV CKd-7, AAV CKd-8, AAV CKd-B1, AAV CKd-B2, AAV CKd-B3, AAV CKd-B4, AAV CKd-B5, AAV CKd-B6, AAV CKd-B7, AAV CKd-B8, AAV CKd-H1, AAV CKd-H2, AAV CKd-H3, AAV CKd-H4, AAV CKd-H5, AAV CKd-H6, AAV CKd-N3, AAV CKd-N4, AAV CKd-N9, AAV CLg-F1, AAV CLg-F2, AAV CLg-F3, AAV CLg-F4, AAV CLg-F5, AAV CLg-F6, AAV CLg-F7, AAV CLg-F8, AAV CLv-1, AAV CLv1-1, AAV Clv1-10, AAV CLv1-2, AAV CLv-12, AAV CLv1-3, AAV CLv-13, AAV CLv1-4, AAV Clv1-7, AAV Clv1-8, AAV Clv1-9, AAV CLv-2, AAV CLv-3, AAV CLv-4, AAV CLV-6, AAV CLv-8, AAV CLv-D1, AAV CLv-D2, AAV CLv-D3, AAV CLv-D4, AAV CLv-D5, AAV CLv-D6, AAV CLv-D7, AAV CLv-D8, AAV CLv-E1, AAV CLv-K1, AAV CLv-K3, AAV CLv-K6, AAV CLv-L4, AAV CLv-L5, AAV CLv-L6, AAV CLv-M1, AAV CLv-M11, AAV CLv-M2, AAV CLv-M5, AAV CLv-M6, AAV CLv-M7, AAV CLv-M8, AAV CLv-M9, AAV CLv-R1, AAV CLv-R2, AAV CLv-R3, AAV CLv-R4, AAV CLv-R5, AAV CLv-R6, AAV CLv-R7, AAV CLv-R8, AAV CLv-R9, AAV CSp-1, AAV CSp-10, AAV CSp-11, AAV CSp-2, AAV CSp-3, AAV CSp-4, AAV CSp-6, AAV CSp-7, AAV CSp-8, AAV CSp-8.10, AAV CSp-8.2, AAV CSp-8.4, AAV CSp-8.5, AAV CSp-8.6, AAV CSp-8.7, AAV CSp-8.8, AAV CSp-8.9, AAV CSp-9, AAV.hu.48R3, AAV.VR-355, AAV3B, AAV4, AAV5, AAVF1/HSC1, AAVF11/HSC11, AAVF12/HSC12, AAVF13/HSC13, AAVF14/HSC14, AAVF15/HSC15, AAVF16/HSC16, AAVF17/HSC17, AAVF2/HSC2, AAVF3/HSC3, AAVF4/HSC4, AAVF5/HSC5, AAVF6/HSC6, AAVF7/HSC7, AAVF8/HSC8, and/or AAVF9/HSC9 and variants thereof.

[0413] In some embodiments, the AAV serotype may be, or have, a sequence as described in United States Publication No. US20030138772, the contents of which are herein incorporated by reference in their entirety, such as, but not limited to, AAV1 (SEQ ID NO: 6 and 64 of US20030138772), AAV2 (SEQ ID NO: 7 and 70 of US20030138772), AAV3 (SEQ ID NO: 8 and 71 of US20030138772), AAV4 (SEQ ID NO: 63 of US20030138772), AAV5 (SEQ ID NO: 114 of US20030138772), AAV6 (SEQ ID NO: 65 of US20030138772), AAV7 (SEQ ID NO: 1-3 of US20030138772), AAV8 (SEQ ID NO: 4 and 95 of US20030138772), AAV9 (SEQ ID NO: 5 and 100 of US20030138772), AAV10 (SEQ ID NO: 117 of US20030138772), AAV11 (SEQ ID NO: 118 of US20030138772), AAV12 (SEQ ID NO: 119 of US20030138772), AAVrh10 (amino acids 1 to 738 of SEQ ID NO: 81 of US20030138772), AAV16.3 (US20030138772 SEQ ID NO: 10), AAV29.3/bb.1 (US20030138772 SEQ ID NO: 11), AAV29.4 (US20030138772 SEQ ID NO: 12), AAV29.5/bb.2 (US20030138772 SEQ ID NO: 13), AAV1.3 (US20030138772 SEQ ID NO: 14), AAV13.3 (US20030138772 SEQ ID NO: 15), AAV24.1 (US20030138772 SEQ ID NO: 16), AAV27.3 (US20030138772 SEQ ID NO: 17), AAV7.2 (US20030138772 SEQ ID NO: 18), AAVC1 (US20030138772 SEQ ID NO: 19), AAVC3 (US20030138772 SEQ ID NO: 20), AAVC5 (US20030138772 SEQ ID NO: 21), AAVF1 (US20030138772 SEQ ID NO: 22), AAVF3 (US20030138772 SEQ ID NO: 23), AAVF5 (US20030138772 SEQ ID NO: 24), AAVH6 (US20030138772 SEQ ID NO: 25), AAVH2 (US20030138772 SEQ ID NO: 26), AAV42-8 (US20030138772 SEQ ID NO: 27), AAV42-15 (US20030138772 SEQ ID NO: 28), AAV42-5b (US20030138772 SEQ ID NO: 29), AAV42-1b (US20030138772 SEQ ID NO: 30), AAV42-13 (US20030138772 SEQ ID NO: 31), AAV42-3a (US20030138772 SEQ ID NO: 32), AAV42-4 (US20030138772 SEQ ID NO: 33), AAV42-5a (US20030138772 SEQ ID NO: 34), AAV42-10 (US20030138772 SEQ ID NO: 35), AAV42-3b (US20030138772 SEQ ID NO: 36), AAV42-11 (US20030138772 SEQ ID NO: 37), AAV42-6b (US20030138772 SEQ ID NO: 38), AAV43-1 (US20030138772 SEQ ID NO: 39), AAV43-5 (US20030138772 SEQ ID NO: 40), AAV43-12 (US20030138772 SEQ ID NO: 41), AAV43-20 (US20030138772 SEQ ID NO: 42), AAV43-21 (US20030138772 SEQ ID NO: 43), AAV43-23 (US20030138772 SEQ ID NO: 44), AAV43-25 (US20030138772 SEQ ID NO: 45), AAV44.1 (US20030138772 SEQ ID NO: 46), AAV44.5 (US20030138772 SEQ ID NO: 47), AAV223.1 (US20030138772 SEQ ID NO: 48), AAV223.2 (US20030138772 SEQ ID NO: 49), AAV223.4 (US20030138772 SEQ ID NO: 50), AAV223.5 (US20030138772 SEQ ID NO: 51), AAV223.6 (US20030138772 SEQ ID NO: 52), AAV223.7 (US20030138772 SEQ ID NO: 53), AAVA3.4 (US20030138772 SEQ ID NO: 54), AAVA3.5 (US20030138772 SEQ ID NO: 55), AAVA3.7 (US20030138772 SEQ ID NO: 56), AAVA3.3 (US20030138772 SEQ ID NO: 57), AAV42.12 (US20030138772 SEQ ID NO: 58), AAV44.2 (US20030138772 SEQ ID NO: 59), AAV42-2 (US20030138772 SEQ ID NO: 9), or variants thereof.

[0414] In some embodiments, the AAV serotype may be, or have, a sequence as described in United States Publication No. US20150159173, the contents of which are herein incorporated by reference in their entirety, such as, but not limited to, AAV2 (SEQ ID NO: 7 and 23 of US20150159173), rh20 (SEQ ID NO: 1 of US20150159173), rh32/33 (SEQ ID NO: 2 of US20150159173), rh39 (SEQ ID NO: 3, 20 and 36 of US20150159173), rh46 (SEQ ID NO: 4 and 22 of US20150159173), rh73 (SEQ ID NO: 5 of US20150159173), rh74 (SEQ ID NO: 6 of US20150159173), AAV6.1 (SEQ ID NO: 29 of US20150159173), rh.8 (SEQ ID NO: 41 of US20150159173), rh.48.1 (SEQ ID NO: 44 of US20150159173), hu.44 (SEQ ID NO: 45 of US20150159173), hu.29 (SEQ ID NO: 42 of US20150159173), hu.48 (SEQ ID NO: 38 of US20150159173), rh54 (SEQ ID NO: 49 of US20150159173), AAV2 (SEQ ID NO: 7 of US20150159173), cy.5 (SEQ ID NO: 8 and 24 of US20150159173), rh. 10 (SEQ ID NO: 9 and 25 of US20150159173), rh. 13 (SEQ ID NO: 10 and 26 of US20150159173), AAV1 (SEQ ID NO: 11 and 27 of US20150159173), AAV3 (SEQ ID NO: 12 and 28 of US20150159173), AAV6 (SEQ ID NO: 13 and 29 of US20150159173), AAV7 (SEQ ID NO: 14 and 30 of US20150159173), AAV8 (SEQ ID NO: 15 and 31 of US20150159173), hu. 13 (SEQ ID NO: 16 and 32 of US20150159173), hu.26 (SEQ ID NO: 17 and 33 of US20150159173), hu.37 (SEQ ID NO: 18 and 34 of US20150159173), hu.53 (SEQ ID NO: 19 and 35 of US20150159173), rh.43 (SEQ ID NO: 21 and 37 of US20150159173), rh2 (SEQ ID NO: 39 of US20150159173), rh.37 (SEQ ID NO: 40 of US20150159173), rh.64 (SEQ ID NO: 43 of US20150159173), rh.48 (SEQ ID NO: 44 of US20150159173), ch.5 (SEQ ID NO 46 of US20150159173), rh.67 (SEQ ID NO: 47 of US20150159173), rh.58 (SEQ ID NO: 48 of US20150159173), or variants thereof including, but not limited to Cy5R1, Cy5R2, Cy5R3, Cy5R4, rh.13R, rh.37R2, rh.2R, rh.8R, rh.48.1, rh.48.2, rh.48.1.2, hu.44R1, hu.44R2, hu.44R3, hu.29R, ch.5R1, rh64R1, rh64R2, AAV6.2, AAV6.1, AAV6.12, hu.48R1, hu.48R2, and hu.48R3.

[0415] In some embodiments, the AAV serotype may be, or have, a sequence as described in U.S. Pat. No. 7,198,951, the contents of which are herein incorporated by reference in their entirety, such as, but not limited to, AAV9 (SEQ ID NO: 1-3 of U.S. Pat. No. 7,198,951), AAV2 (SEQ ID NO: 4 of U.S. Pat. No. 7,198,951), AAV1 (SEQ ID NO: 5 of U.S. Pat. No. 7,198,951), AAV3 (SEQ ID NO: 6 of U.S. Pat. No. 7,198,951), and AAV8 (SEQ ID NO: 7 of U.S. Pat. No. 7,198,951).

[0416] In some embodiments, the AAV serotype may be, or have, a mutation in the AAV9 sequence as described by N Pulicherla et al. (Molecular Therapy 19 (6): 1070-1078 (2011), herein incorporated by reference in its entirety), such as but not limited to, AAV9.9, AAV9.11, AAV9.13, AAV9.16, AAV9.24, AAV9.45, AAV9.47, AAV9.61, AAV9.68, AAV9.84.

[0417] In some embodiments, the AAV serotype may be, or have, a sequence as described in U.S. Pat. No. 6,156,303, the contents of which are herein incorporated by reference in their entirety, such as, but not limited to, AAV3B (SEQ ID NO: 1 and 10 of U.S. Pat. No. 6,156,303), AAV6 (SEQ ID NO: 2, 7 and 11 of U.S. Pat. No. 6,156,303), AAV2 (SEQ ID NO: 3 and 8 of U.S. Pat. No. 6,156,303), AAV3A (SEQ ID NO: 4 and 9, of U.S. Pat. No. 6,156,303), or derivatives thereof.

[0418] In some embodiments, the AAV serotype may be, or have, a sequence as described in United States Publication No. US20140359799, the contents of which are herein incorporated by reference in their entirety, such as, but not limited to, AAV8 (SEQ ID NO: 1 of US20140359799), AAVDJ (SEQ ID NO: 2 and 3 of US20140359799), or variants thereof.

[0419] In some embodiments, the serotype may be AAVDJ or a variant thereof, such as AAVDJ8 (or AAV-DJ8), as described by Grimm et al. (Journal of Virology 82 (12): 5887-5911 (2008), herein incorporated by reference in its entirety). The amino acid sequence of AAVDJ8 may comprise two or more mutations in order to remove the heparin binding domain (HBD). As a non-limiting example, the AAV-DJ sequence described as SEQ ID NO: 1 in U.S. Pat. No. 7,588,772, the contents of which are herein incorporated by reference in their entirety, may comprise two mutations: (1) R587Q where arginine (R; Arg) at amino acid 587 is changed to glutamine (Q; Gln) and (2) R590T where arginine (R; Arg) at amino acid 590 is changed to threonine (T; Thr). As another non-limiting example, may comprise three mutations: (1) K406R where lysine (K; Lys) at amino acid 406 is changed to arginine (R; Arg), (2) R587Q where arginine (R; Arg) at amino acid 587 is changed to glutamine (Q; Gln) and (3) R590T where arginine (R; Arg) at amino acid 590 is changed to threonine (T; Thr).

[0420] In some embodiments, the AAV serotype may be, or have, a sequence of AAV4 as described in International Publication No. WO1998011244, the contents of which are herein incorporated by reference in their entirety, such as, but not limited to AAV4 (SEQ ID NO: 1-20 of WO1998011244).

[0421] In some embodiments, the AAV serotype may be, or have, a mutation in the AAV2 sequence to generate AAV2G9 as described in International Publication No. WO2014144229 and herein incorporated by reference in its entirety.

[0422] In some embodiments, the AAV serotype may be, or have, a sequence as described in International Publication No. WO2005033321, the contents of which are herein incorporated by reference in their entirety, such as, but not limited to AAV3-3 (SEQ ID NO: 217 of WO2005033321), AAV1 (SEQ ID NO: 219 and 202 of WO2005033321), AAV106.1/hu.37 (SEQ ID No: 10 of WO2005033321), AAV114.3/hu.40 (SEQ ID No: 11 of WO2005033321), AAV127.2/hu.41 (SEQ ID NO:6 and 8 of WO2005033321), AAV128.3/hu.44 (SEQ ID No: 81 of WO2005033321), AAV130.4/hu.48 (SEQ ID NO: 78 of WO2005033321), AAV145.1/hu.53 (SEQ ID No: 176 and 177 of WO2005033321), AAV145.6/hu.56 (SEQ ID NO: 168 and 192 of WO2005033321), AAV16.12/hu.11 (SEQ ID NO: 153 and 57 of WO2005033321), AAV16.8/hu.10 (SEQ ID NO: 156 and 56 of WO2005033321), AAV161.10/hu.60 (SEQ ID No: 170 of WO2005033321), AAV161.6/hu.61 (SEQ ID No: 174 of WO2005033321), AAV1-7/rh.48 (SEQ ID NO: 32 of WO2005033321), AAV1-8/rh.49 (SEQ ID NOs: 103 and 25 of WO2005033321), AAV2 (SEQ ID NO: 211 and 221 of WO2005033321), AAV2-15/rh.62 (SEQ ID No: 33 and 114 of WO2005033321), AAV2-3/rh.61 (SEQ ID NO: 21 of WO2005033321), AAV2-4/rh.50 (SEQ ID No: 23 and 108 of WO2005033321), AAV2-5/rh.51 (SEQ ID NO: 104 and 22 of WO2005033321), AAV3.1/hu.6 (SEQ ID NO: 5 and 84 of WO2005033321), AAV3.1/hu.9 (SEQ ID NO: 155 and 58 of WO2005033321), AAV3-11/rh.53 (SEQ ID NO: 186 and 176 of WO2005033321), AAV3-3 (SEQ ID NO: 200 of WO2005033321), AAV33.12/hu.17 (SEQ ID NO:4 of WO2005033321), AAV33.4/hu.15 (SEQ ID No: 50 of WO2005033321), AAV33.8/hu.16 (SEQ ID No: 51 of WO2005033321), AAV3-9/rh.52 (SEQ ID NO: 96 and 18 of WO2005033321), AAV4-19/rh.55 (SEQ ID NO: 117 of WO2005033321), AAV4-4 (SEQ ID NO: 201 and 218 of WO2005033321), AAV4-9/rh.54 (SEQ ID NO: 116 of WO2005033321), AAV5 (SEQ ID NO: 199 and 216 of WO2005033321), AAV52.1/hu.20 (SEQ ID NO: 63 of WO2005033321), AAV52/hu.19 (SEQ ID NO: 133 of WO2005033321), AAV5-22/rh.58 (SEQ ID No: 27 of WO2005033321), AAV5-3/rh.57 (SEQ ID NO: 105 of WO2005033321), AAV5-3/rh.57 (SEQ ID No: 26 of WO2005033321), AAV58.2/hu.25 (SEQ ID No: 49 of WO2005033321), AAV6 (SEQ ID NO: 203 and 220 of WO2005033321), AAV7 (SEQ ID NO: 222 and 213 of WO2005033321), AAV7.3/hu.7 (SEQ ID No: 55 of WO2005033321), AAV8 (SEQ ID NO: 223 and 214 of WO2005033321), AAVH-1/hu.1 (SEQ ID No: 46 of WO2005033321), AAVH-5/hu.3 (SEQ ID No: 44 of WO2005033321), AAVhu.1 (SEQ ID NO: 144 of WO2005033321), AAVhu.10 (SEQ ID NO: 156 of WO2005033321), AAVhu. 11 (SEQ ID NO: 153 of WO2005033321), AAVhu. 12 (WO2005033321 SEQ ID NO: 59), AAVhu. 13 (SEQ ID NO: 129 of WO2005033321), AAVhu.14/AAV9 (SEQ ID NO: 123 and 3 of WO2005033321), AAVhu.15 (SEQ ID NO: 147 of WO2005033321), AAVhu. 16 (SEQ ID NO: 148 of WO2005033321), AAVhu. 17 (SEQ ID NO: 83 of WO2005033321), AAVhu. 18 (SEQ ID NO: 149 of WO2005033321), AAVhu. 19 (SEQ ID NO: 133 of WO2005033321), AAVhu.2 (SEQ ID NO: 143 of WO2005033321), AAVhu.20 (SEQ ID NO: 134 of WO2005033321), AAVhu.21 (SEQ ID NO: 135 of WO2005033321), AAVhu.22 (SEQ ID NO: 138 of WO2005033321), AAVhu.23.2 (SEQ ID NO: 137 of WO2005033321), AAVhu.24 (SEQ ID NO: 136 of WO2005033321), AAVhu.25 (SEQ ID NO: 146 of WO2005033321), AAVhu.27 (SEQ ID NO: 140 of WO2005033321), AAVhu.29 (SEQ ID NO: 132 of WO2005033321), AAVhu.3 (SEQ ID NO: 145 of WO2005033321), AAVhu.31 (SEQ ID NO: 121 of WO2005033321), AAVhu.32 (SEQ ID NO: 122 of WO2005033321), AAVhu.34 (SEQ ID NO: 125 of WO2005033321), AAVhu.35 (SEQ ID NO: 164 of WO2005033321), AAVhu.37 (SEQ ID NO: 88 of WO2005033321), AAVhu.39 (SEQ ID NO: 102 of WO2005033321), AAVhu.4 (SEQ ID NO: 141 of WO2005033321), AAVhu.40 (SEQ ID NO: 87 of WO2005033321), AAVhu.41 (SEQ ID NO: 91 of WO2005033321), AAVhu.42 (SEQ ID NO: 85 of WO2005033321), AAVhu.43 (SEQ ID NO: 160 of WO2005033321), AAVhu.44 (SEQ ID NO: 144 of WO2005033321), AAVhu.45 (SEQ ID NO: 127 of WO2005033321), AAVhu.46 (SEQ ID NO: 159 of WO2005033321), AAVhu.47 (SEQ ID NO: 128 of WO2005033321), AAVhu.48 (SEQ ID NO: 157 of WO2005033321), AAVhu.49 (SEQ ID NO: 189 of WO2005033321), AAVhu.51 (SEQ ID NO: 190 of WO2005033321), AAVhu.52 (SEQ ID NO: 191 of WO2005033321), AAVhu.53 (SEQ ID NO: 186 of WO2005033321), AAVhu.54 (SEQ ID NO: 188 of WO2005033321), AAVhu.55 (SEQ ID NO: 187 of WO2005033321), AAVhu.56 (SEQ ID NO: 192 of WO2005033321), AAVhu.57 (SEQ ID NO: 193 of WO2005033321), AAVhu.58 (SEQ ID NO: 194 of WO2005033321), AAVhu.6 (SEQ ID NO: 84 of WO2005033321), AAVhu.60 (SEQ ID NO: 184 of WO2005033321), AAVhu.61 (SEQ ID NO: 185 of WO2005033321), AAVhu.63 (SEQ ID NO: 195 of WO2005033321), AAVhu.64 (SEQ ID NO: 196 of WO2005033321), AAVhu.66 (SEQ ID NO: 197 of WO2005033321), AAVhu.67 (SEQ ID NO: 198 of WO2005033321), AAVhu.7 (SEQ ID NO: 150 of WO2005033321), AAVhu.8 (WO2005033321 SEQ ID NO: 12), AAVhu.9 (SEQ ID NO: 155 of WO2005033321), AAVLG-10/rh.40 (SEQ ID No: 14 of WO2005033321), AAVLG-4/rh.38 (SEQ ID NO: 86 of WO2005033321), AAVLG-4/rh.38 (SEQ ID No: 7 of WO2005033321), AAVN721-8/rh.43 (SEQ ID NO: 163 of WO2005033321), AAVN721-8/rh.43 (SEQ ID No: 43 of WO2005033321), AAVpi.1 (WO2005033321 SEQ ID NO: 28), AAVpi.2 (WO2005033321 SEQ ID NO: 30), AAVpi.3 (WO2005033321 SEQ ID NO: 29), AAVrh.38 (SEQ ID NO: 86 of WO2005033321), AAVrh.40 (SEQ ID NO: 92 of WO2005033321), AAVrh.43 (SEQ ID NO: 163 of WO2005033321), AAVrh.44 (WO2005033321 SEQ ID NO: 34), AAVrh.45 (WO2005033321 SEQ ID NO: 41), AAVrh.47 (WO2005033321 SEQ ID NO: 38), AAVrh.48 (SEQ ID NO: 115 of WO2005033321), AAVrh.49 (SEQ ID NO: 103 of WO2005033321), AAVrh.50 (SEQ ID NO: 108 of WO2005033321), AAVrh.51 (SEQ ID NO: 104 of WO2005033321), AAVrh.52 (SEQ ID NO: 96 of WO2005033321), AAVrh.53 (SEQ ID NO: 97 of WO2005033321), AAVrh.55 (WO2005033321 SEQ ID NO: 37), AAVrh.56 (SEQ ID NO: 152 of WO2005033321), AAVrh.57 (SEQ ID NO: 105 of WO2005033321), AAVrh.58 (SEQ ID NO: 106 of WO2005033321), AAVrh.59 (WO2005033321 SEQ ID NO: 42), AAVrh.60 (WO2005033321 SEQ ID NO: 31), AAVrh.61 (SEQ ID NO: 107 of WO2005033321), AAVrh.62 (SEQ ID NO: 114 of WO2005033321), AAVrh.64 (SEQ ID NO: 99 of WO2005033321), AAVrh.65 (WO2005033321 SEQ ID NO: 35), AAVrh.68 (WO2005033321 SEQ ID NO: 16), AAVrh.69 (WO2005033321 SEQ ID NO: 39), AAVrh.70 (WO2005033321 SEQ ID NO: 20), AAVrh.72 (WO2005033321 SEQ ID NO: 9), or variants thereof including, but not limited to, AAVcy.2, AAVcy.3, AAVcy.4, AAVcy.5, AAVcy.6, AAVrh. 12, AAVrh.17, AAVrh.18, AAVrh. 19, AAVrh.21, AAVrh.22, AAVrh.23, AAVrh.24, AAVrh.25, AAVrh.25/42 15, AAVrh.31, AAVrh.32, AAVrh.33, AAVrh.34, AAVrh.35, AAVrh.36, AAVrh.37, AAVrh14. Non limiting examples of variants include SEQ ID NO: 13, 15, 17, 19, 24, 36, 40, 45, 47, 48, 51-54, 60-62, 64-77, 79, 80, 82, 89, 90, 93-95, 98, 100, 101, 109-113, 118-120, 124, 126, 131, 139, 142, 151,154, 158, 161, 162, 165-183, 202, 204-212, 215, 219, 224-236, of WO2005033321, the contents of which are herein incorporated by reference in their entirety.

[0423] In some embodiments, the AAV serotype may be, or have, a sequence as described in International Publication No. WO2015168666, the contents of which are herein incorporated by reference in their entirety, such as, but not limited to, AAVrh8R (SEQ ID NO: 9 of WO2015168666), AAVrh8R A586R mutant (SEQ ID NO: 10 of WO2015168666), AAVrh8R R533A mutant (SEQ ID NO: 11 of WO2015168666), or variants thereof.

[0424] In some embodiments, the AAV serotype may be, or have, a sequence as described in U.S. Pat. No. 9,233,131, the contents of which are herein incorporated by reference in their entirety, such as, but not limited to, AAVhE1.1 (SEQ ID NO:44 of U.S. Pat. No. 9,233,131), AAVhEr1.5 (SEQ ID NO:45 of U.S. Pat. No. 9,233,131), AAVhER1.14 (SEQ ID NO:46 of U.S. Pat. No. 9,233,131), AAVhEr1.8 (SEQ ID NO:47 of U.S. Pat. No. 9,233,131), AAVhEr1.16 (SEQ ID NO:48 of U.S. Pat. No. 9,233,131), AAVhEr1.18 (SEQ ID NO:49 of U.S. Pat. No. 9,233,131), AAVhEr1.35 (SEQ ID NO:50 of U.S. Pat. No. 9,233,131), AAVhEr1.7 (SEQ ID NO:51 of U.S. Pat. No. 9,233,131), AAVhEr1.36 (SEQ ID NO:52 of U.S. Pat. No. 9,233,131), AAVhEr2.29 (SEQ ID NO:53 of U.S. Pat. No. 9,233,131), AAVhEr2.4 (SEQ ID NO:54 of U.S. Pat. No. 9,233,131), AAVhEr2.16 (SEQ ID NO:55 of U.S. Pat. No. 9,233,131), AAVhEr2.30 (SEQ ID NO:56 of U.S. Pat. No. 9,233,131), AAVhEr2.31 (SEQ ID NO:58 of U.S. Pat. No. 9,233,131), AAVhEr2.36 (SEQ ID NO:57 of U.S. Pat. No. 9,233,131), AAVhER1.23 (SEQ ID NO:53 of U.S. Pat. No. 9,233,131), AAVhEr3.1 (SEQ ID NO:59 of U.S. Pat. No. 9,233,131), AAV2.5T (SEQ ID NO:42 of U.S. Pat. No. 9,233,131), or variants thereof.

[0425] In some embodiments, the AAV serotype may be, or have, a sequence as described in United States Patent Publication No. US20150376607, the contents of which are herein incorporated by reference in their entirety, such as, but not limited to, AAV-PAEC (SEQ ID NO: 1 of US20150376607), AAV-LK01 (SEQ ID NO:2 of US20150376607), AAV-LK02 (SEQ ID NO: 3 of US20150376607), AAV-LK03 (SEQ ID NO:4 of US20150376607), AAV-LK04 (SEQ ID NO:5 of US20150376607), AAV-LK05 (SEQ ID NO:6 of US20150376607), AAV-LK06 (SEQ ID NO:7 of US20150376607), AAV-LK07 (SEQ ID NO:8 of US20150376607), AAV-LK08 (SEQ ID NO:9 of US20150376607), AAV-LK09 (SEQ ID NO:10 of US20150376607), AAV-LK10 (SEQ ID NO:11 of US20150376607), AAV-LK11 (SEQ ID NO: 12 of US20150376607), AAV-LK12 (SEQ ID NO:13 of US20150376607), AAV-LK13 (SEQ ID NO:14 of US20150376607), AAV-LK14 (SEQ ID NO:15 of US20150376607), AAV-LK15 (SEQ ID NO:16 of US20150376607), AAV-LK16 (SEQ ID NO:17 of US20150376607), AAV-LK17 (SEQ ID NO:18 of US20150376607), AAV-LK18 (SEQ ID NO:19 of US20150376607), AAV-LK19 (SEQ ID NO:20 of US20150376607), AAV-PAEC2 (SEQ ID NO: 21 of US20150376607), AAV-PAEC4 (SEQ ID NO:22 of US20150376607), AAV-PAEC6 (SEQ ID NO:23 of US20150376607), AAV-PAEC7 (SEQ ID NO:24 of US20150376607), AAV-PAEC8 (SEQ ID NO:25 of US20150376607), AAV-PAEC11 (SEQ ID NO:26 of US20150376607), AAV-PAEC12 (SEQ ID NO:27, of US20150376607), or variants thereof.

[0426] In some embodiments, the AAV serotype may be, or have, a sequence as described in U.S. Pat. No. 9,163,261, the contents of which are herein incorporated by reference in their entirety, such as, but not limited to, AAV-2-pre-miRNA-101 (SEQ ID NO: 1 U.S. Pat. No. 9,163,261), or variants thereof.

[0427] In some embodiments, the AAV serotype may be, or have, a sequence as described in United States Patent Publication No. US20150376240, the contents of which are herein incorporated by reference in their entirety, such as, but not limited to, AAV-8h (SEQ ID NO: 6 of US20150376240), AAV-8b (SEQ ID NO: 5 of US20150376240), AAV-h (SEQ ID NO: 2 of US20150376240), AAV-b (SEQ ID NO: 1 of US20150376240), or variants thereof.

[0428] In some embodiments, the AAV serotype may be, or have, a sequence as described in United States Patent Publication No. US20160017295, the contents of which are herein incorporated by reference in their entirety, such as, but not limited to, AAV SM 10-2 (SEQ ID NO: 22 of US20160017295), AAV Shuffle 100-1 (SEQ ID NO: 23 of US20160017295), AAV Shuffle 100-3 (SEQ ID NO: 24 of US20160017295), AAV Shuffle 100-7 (SEQ ID NO: 25 of US20160017295), AAV Shuffle 10-2 (SEQ ID NO: 34 of US20160017295), AAV Shuffle 10-6 (SEQ ID NO: 35 of US20160017295), AAV Shuffle 10-8 (SEQ ID NO: 36 of US20160017295), AAV Shuffle 100-2 (SEQ ID NO: 37 of US20160017295), AAV SM 10-1 (SEQ ID NO: 38 of US20160017295), AAV SM 10-8 (SEQ ID NO: 39 of US20160017295), AAV SM 100-3 (SEQ ID NO: 40 of US20160017295), AAV SM 100-10 (SEQ ID NO: 41 of US20160017295), or variants thereof.

[0429] In some embodiments, the AAV serotype may be, or have, a sequence as described in United States Patent Publication No. US20150238550, the contents of which are herein incorporated by reference in their entirety, such as, but not limited to, BNP61 AAV (SEQ ID NO: 1 of US20150238550), BNP62 AAV (SEQ ID NO: 3 of US20150238550), BNP63 AAV (SEQ ID NO: 4 of US20150238550), or variants thereof.

[0430] In some embodiments, the AAV serotype may be or may have a sequence as described in United States Patent Publication No. US20150315612, the contents of which are herein incorporated by reference in their entirety, such as, but not limited to, AAVrh.50 (SEQ ID NO: 108 of US20150315612), AAVrh.43 (SEQ ID NO: 163 of US20150315612), AAVrh.62 (SEQ ID NO: 114 of US20150315612), AAVrh.48 (SEQ ID NO: 115 of US20150315612), AAVhu. 19 (SEQ ID NO: 133 of US20150315612), AAVhu. 11 (SEQ ID NO: 153 of US20150315612), AAVhu.53 (SEQ ID NO: 186 of US20150315612), AAV4-8/rh.64 (SEQ ID No: 15 of US20150315612), AAVLG-9/hu.39 (SEQ ID No: 24 of US20150315612), AAV54.5/hu.23 (SEQ ID No: 60 of US20150315612), AAV54.2/hu.22 (SEQ ID No: 67 of US20150315612), AAV54.7/hu.24 (SEQ ID No: 66 of US20150315612), AAV54.1/hu.21 (SEQ ID No: 65 of US20150315612), AAV54.4R/hu.27 (SEQ ID No: 64 of US20150315612), AAV46.2/hu.28 (SEQ ID No: 68 of US20150315612), AAV46.6/hu.29 (SEQ ID No: 69 of US20150315612), AAV128.1/hu.43 (SEQ ID No: 80 of US20150315612), or variants thereof.

[0431] In some embodiments, the AAV serotype may be, or have, a sequence as described in International Publication No. WO2015121501, the contents of which are herein incorporated by reference in their entirety, such as, but not limited to, true type AAV (ttAAV) (SEQ ID NO: 2 of WO2015121501), “UPenn AAV10” (SEQ ID NO: 8 of WO2015121501), “Japanese AAV10” (SEQ ID NO: 9 of WO2015121501), or variants thereof.

[0432] According to the present disclosure, AAV capsid serotype selection or use may be from a variety of species. In some embodiments, the AAV may be an avian AAV (AAAV). The AAAV serotype may be, or have, a sequence as described in U.S. Pat. No. 9,238,800, the contents of which are herein incorporated by reference in their entirety, such as, but not limited to, AAAV (SEQ ID NO: 1, 2, 4, 6, 8, 10, 12, and 14 of U.S. Pat. No. 9,238,800), or variants thereof.

[0433] In some embodiments, the AAV may be a bovine AAV (BAAV). The BAAV serotype may be, or have, a sequence as described in U.S. Pat. No. 9,193,769, the contents of which are herein incorporated by reference in their entirety, such as, but not limited to, BAAV (SEQ ID NO: 1 and 6 of U.S. Pat. No. 9,193,769), or variants thereof. The BAAV serotype may be or have a sequence as described in U.S. Pat. No. 7,427,396, the contents of which are herein incorporated by reference in their entirety, such as, but not limited to, BAAV (SEQ ID NO: 5 and 6 of U.S. Pat. No. 7,427,396), or variants thereof.

[0434] In some embodiments, the AAV may be a caprine AAV. The caprine AAV serotype may be, or have, a sequence as described in U.S. Pat. No. 7,427,396, the contents of which are herein incorporated by reference in their entirety, such as, but not limited to, caprine AAV (SEQ ID NO: 3 of U.S. Pat. No. 7,427,396), or variants thereof.

[0435] In other embodiments the AAV may be engineered as a hybrid AAV from two or more parental serotypes. In some embodiments, the AAV may be AAV2G9 which comprises sequences from AAV2 and AAV9. The AAV2G9 AAV serotype may be, or have, a sequence as described in United States Patent Publication No. US20160017005, the contents of which are herein incorporated by reference in their entirety.

[0436] In some embodiments, the AAV may be a serotype generated by the AAV9 capsid library with mutations in amino acids 390-627 (VP1 numbering) as described by Pulicherla et al. (Molecular Therapy 19 (6): 1070-1078 (2011), the contents of which are herein incorporated by reference in their entirety. The serotype and corresponding nucleotide and amino acid substitutions may be, but is not limited to, AAV9.1 (G1594C; D532H), AAV6.2 (T1418A and T1436X; V473D and I479K), AAV9.3 (T1238A; F413Y), AAV9.4 (T1250C and A1617T; F417S), AAV9.5 (A1235G, A1314T, A1642G, C1760T; Q412R, T548A, A587V), AAV9.6 (T1231A; F411I), AAV9.9 (G1203A, G1785T; W595C), AAV9.10 (A1500G, T1676C; M559T), AAV9.11 (A1425T, A1702C, A1769T; T568P, Q590L), AAV9.13 (A1369C, A1720T; N457H, T574S), AAV9.14 (T1340A, T1362C, T1560C, G1713A; L447H), AAV9.16 (A1775T; Q592L), AAV9.24 (T1507C, T1521G; W503R), AAV9.26 (A1337G, A1769C; Y446C, Q590P), AAV9.33 (A1667C; D556A), AAV9.34 (A1534G, C1794T; N512D), AAV9.35 (A1289T, T1450A, C1494T, A1515T, C1794A, G1816A; Q430L, Y484N, N98K, V606I), AAV9.40 (A1694T, E565V), AAV9.41 (A1348T, T1362C; T450S), AAV9.44 (A1684C, A1701T, A1737G; N562H, K567N), AAV9.45 (A1492T, C1804T; N498Y, L602F), AAV9.46 (G1441C, T1525C, T1549G; G481R, W509R, L517V), 9.47 (G1241A, G1358A, A1669G, C1745T; S414N, G453D, K557E, T582I), AAV9.48 (C1445T, A1736T; P482L, Q579L), AAV9.50 (A1638T, C1683T, T1805A; Q546H, L602H), AAV9.53 (G1301A, A1405C, C1664T, G1811T; R134Q, S469R, A555V, G604V), AAV9.54 (C1531A, T1609A; L511I, L537M), AAV9.55 (T1605A; F535L), AAV9.58 (C1475T, C1579A; T492I, H527N), AAV.59 (T1336C; Y446H), AAV9.61 (A1493T; N4981), AAV9.64 (C1531A, A1617T; L511I), AAV9.65 (C1335T, T1530C, C1568A; A523D), AAV9.68 (C1510A; P504T), AAV9.80 (G1441A, G481R), AAV9.83 (C1402A, A1500T; P468T, E500D), AAV9.87 (T1464C, T1468C; S490P), AAV9.90 (A1196T; Y399F), AAV9.91 (T1316G, A1583T, C1782G, T1806C; L439R, K528I), AAV9.93 (A1273G, A1421G, A1638C, C1712T, G1732A, A1744T, A1832T; S425G, Q474R, Q546H, P571L, G578R, T582S, D611V), AAV9.94 (A1675T; M559L) and AAV9.95 (T1605A; F535L).

[0437] In some embodiments, the AAV serotype may be, or have, a sequence as described in International Publication No. WO2016049230, the contents of which are herein incorporated by reference in their entirety, such as, but not limited to AAVF1/HSC1 (SEQ ID NO: 2 and 20 of WO2016049230), AAVF2/HSC2 (SEQ ID NO: 3 and 21 of WO2016049230), AAVF3/HSC3 (SEQ ID NO: 5 and 22 of WO2016049230), AAVF4/HSC4 (SEQ ID NO: 6 and 23 of WO2016049230), AAVF5/HSC5 (SEQ ID NO: 11 and 25 of WO2016049230), AAVF6/HSC6 (SEQ ID NO: 7 and 24 of WO2016049230), AAVF7/HSC7 (SEQ ID NO: 8 and 27 of WO2016049230), AAVF8/HSC8 (SEQ ID NO: 9 and 28 of WO2016049230), AAVF9/HSC9 (SEQ ID NO: 10 and 29 of WO2016049230), AAVF11/HSC11 (SEQ ID NO: 4 and 26 of WO2016049230), AAVF12/HSC12 (SEQ ID NO: 12 and 30 of WO2016049230), AAVF13/HSC13 (SEQ ID NO: 14 and 31 of WO2016049230), AAVF14/HSC14 (SEQ ID NO: 15 and 32 of WO2016049230), AAVF15/HSC15 (SEQ ID NO: 16 and 33 of WO2016049230), AAVF16/HSC16 (SEQ ID NO: 17 and 34 of WO2016049230), AAVF17/HSC17 (SEQ ID NO: 13 and 35 of WO2016049230), or variants or derivatives thereof.

[0438] In some embodiments, the AAV serotype may be, or have, a sequence as described in U.S. Pat. No. 8,734,809, the contents of which are herein incorporated by reference in their entirety, such as, but not limited to, AAV CBr-E1 (SEQ ID NO: 13 and 87 of U.S. Pat. No. 8,734,809), AAV CBr-E2 (SEQ ID NO: 14 and 88 of U.S. Pat. No. 8,734,809), AAV CBr-E3 (SEQ ID NO: 15 and 89 of U.S. Pat. No. 8,734,809), AAV CBr-E4 (SEQ ID NO: 16 and 90 of U.S. Pat. No. 8,734,809), AAV CBr-E5 (SEQ ID NO: 17 and 91 of U.S. Pat. No. 8,734,809), AAV CBr-e5 (SEQ ID NO: 18 and 92 of U.S. Pat. No. 8,734,809), AAV CBr-E6 (SEQ ID NO: 19 and 93 of U.S. Pat. No. 8,734,809), AAV CBr-E7 (SEQ ID NO: 20 and 94 of U.S. Pat. No. 8,734,809), AAV CBr-E8 (SEQ ID NO: 21 and 95 of U.S. Pat. No. 8,734,809), AAV CLv-D1 (SEQ ID NO: 22 and 96 of U.S. Pat. No. 8,734,809), AAV CLv-D2 (SEQ ID NO: 23 and 97 of U.S. Pat. No. 8,734,809), AAV CLv-D3 (SEQ ID NO: 24 and 98 of U.S. Pat. No. 8,734,809), AAV CLv-D4 (SEQ ID NO: 25 and 99 of U.S. Pat. No. 8,734,809), AAV CLv-D5 (SEQ ID NO: 26 and 100 of U.S. Pat. No. 8,734,809), AAV CLv-D6 (SEQ ID NO: 27 and 101 of U.S. Pat. No. 8,734,809), AAV CLv-D7 (SEQ ID NO: 28 and 102 of U.S. Pat. No. 8,734,809), AAV CLv-D8 (SEQ ID NO: 29 and 103 of U.S. Pat. No. 8,734,809), AAV CLv-E1 (SEQ ID NO: 13 and 87 of U.S. Pat. No. 8,734,809), AAV CLv-R1 (SEQ ID NO: 30 and 104 of U.S. Pat. No. 8,734,809), AAV CLv-R2 (SEQ ID NO: 31 and 105 of U.S. Pat. No. 8,734,809), AAV CLv-R3 (SEQ ID NO: 32 and 106 of U.S. Pat. No. 8,734,809), AAV CLv-R4 (SEQ ID NO: 33 and 107 of U.S. Pat. No. 8,734,809), AAV CLv-R5 (SEQ ID NO: 34 and 108 of U.S. Pat. No. 8,734,809), AAV CLv-R6 (SEQ ID NO: 35 and 109 of U.S. Pat. No. 8,734,809), AAV CLv-R7 (SEQ ID NO: 36 and 110 of U.S. Pat. No. 8,734,809), AAV CLv-R8 (SEQ ID NO: X and X of U.S. Pat. No. 8,734,809), AAV CLv-R9 (SEQ ID NO: X and X of U.S. Pat. No. 8,734,809), AAV CLg-F1 (SEQ ID NO: 39 and 113 of U.S. Pat. No. 8,734,809), AAV CLg-F2 (SEQ ID NO: 40 and 114 of U.S. Pat. No. 8,734,809), AAV CLg-F3 (SEQ ID NO: 41 and 115 of U.S. Pat. No. 8,734,809), AAV CLg-F4 (SEQ ID NO: 42 and 116 of U.S. Pat. No. 8,734,809), AAV CLg-F5 (SEQ ID NO: 43 and 117 of U.S. Pat. No. 8,734,809), AAV CLg-F6 (SEQ ID NO: 43 and 117 of U.S. Pat. No. 8,734,809), AAV CLg-F7 (SEQ ID NO: 44 and 118 of U.S. Pat. No. 8,734,809), AAV CLg-F8 (SEQ ID NO: 43 and 117 of U.S. Pat. No. 8,734,809), AAV CSp-1 (SEQ ID NO: 45 and 119 of U.S. Pat. No. 8,734,809), AAV CSp-10 (SEQ ID NO: 46 and 120 of U.S. Pat. No. 8,734,809), AAV CSp-11 (SEQ ID NO: 47 and 121 of U.S. Pat. No. 8,734,809), AAV CSp-2 (SEQ ID NO: 48 and 122 of U.S. Pat. No. 8,734,809), AAV CSp-3 (SEQ ID NO: 49 and 123 of U.S. Pat. No. 8,734,809), AAV CSp-4 (SEQ ID NO: 50 and 124 of U.S. Pat. No. 8,734,809), AAV CSp-6 (SEQ ID NO: 51 and 125 of U.S. Pat. No. 8,734,809), AAV CSp-7 (SEQ ID NO: 52 and 126 of U.S. Pat. No. 8,734,809), AAV CSp-8 (SEQ ID NO: 53 and 127 of U.S. Pat. No. 8,734,809), AAV CSp-9 (SEQ ID NO: 54 and 128 of U.S. Pat. No. 8,734,809), AAV CHt-2 (SEQ ID NO: 55 and 129 of U.S. Pat. No. 8,734,809), AAV CHt-3 (SEQ ID NO: 56 and 130 of U.S. Pat. No. 8,734,809), AAV CKd-1 (SEQ ID NO: 57 and 131 of U.S. Pat. No. 8,734,809), AAV CKd-10 (SEQ ID NO: 58 and 132 of U.S. Pat. No. 8,734,809), AAV CKd-2 (SEQ ID NO: 59 and 133 of U.S. Pat. No. 8,734,809), AAV CKd-3 (SEQ ID NO: 60 and 134 of U.S. Pat. No. 8,734,809), AAV CKd-4 (SEQ ID NO: 61 and 135 of U.S. Pat. No. 8,734,809), AAV CKd-6 (SEQ ID NO: 62 and 136 of U.S. Pat. No. 8,734,809), AAV CKd-7 (SEQ ID NO: 63 and 137 of U.S. Pat. No. 8,734,809), AAV CKd-8 (SEQ ID NO: 64 and 138 of U.S. Pat. No. 8,734,809), AAV CLv-1 (SEQ ID NO: 35 and 139 of U.S. Pat. No. 8,734,809), AAV CLv-12 (SEQ ID NO: 66 and 140 of U.S. Pat. No. 8,734,809), AAV CLv-13 (SEQ ID NO: 67 and 141 of U.S. Pat. No. 8,734,809), AAV CLv-2 (SEQ ID NO: 68 and 142 of U.S. Pat. No. 8,734,809), AAV CLv-3 (SEQ ID NO: 69 and 143 of U.S. Pat. No. 8,734,809), AAV CLv-4 (SEQ ID NO: 70 and 144 of U.S. Pat. No. 8,734,809), AAV CLv-6 (SEQ ID NO: 71 and 145 of U.S. Pat. No. 8,734,809), AAV CLv-8 (SEQ ID NO: 72 and 146 of U.S. Pat. No. 8,734,809), AAV CKd-B1 (SEQ ID NO: 73 and 147 of U.S. Pat. No. 8,734,809), AAV CKd-B2 (SEQ ID NO: 74 and 148 of U.S. Pat. No. 8,734,809), AAV CKd-B3 (SEQ ID NO: 75 and 149 of U.S. Pat. No. 8,734,809), AAV CKd-B4 (SEQ ID NO: 76 and 150 of U.S. Pat. No. 8,734,809), AAV CKd-B5 (SEQ ID NO: 77 and 151 of U.S. Pat. No. 8,734,809), AAV CKd-B6 (SEQ ID NO: 78 and 152 of U.S. Pat. No. 8,734,809), AAV CKd-B7 (SEQ ID NO: 79 and 153 of U.S. Pat. No. 8,734,809), AAV CKd-B8 (SEQ ID NO: 80 and 154 of U.S. Pat. No. 8,734,809), AAV CKd-H1 (SEQ ID NO: 81 and 155 of U.S. Pat. No. 8,734,809), AAV CKd-H2 (SEQ ID NO: 82 and 156 of U.S. Pat. No. 8,734,809), AAV CKd-H3 (SEQ ID NO: 83 and 157 of U.S. Pat. No. 8,734,809), AAV CKd-H4 (SEQ ID NO: 84 and 158 of U.S. Pat. No. 8,734,809), AAV CKd-H5 (SEQ ID NO: 85 and 159 of U.S. Pat. No. 8,734,809), AAV CKd-H6 (SEQ ID NO: 77 and 151 of U.S. Pat. No. 8,734,809), AAV CHt-1 (SEQ ID NO: 86 and 160 of U.S. Pat. No. 8,734,809), AAV CLv1-1 (SEQ ID NO: 171 of U.S. Pat. No. 8,734,809), AAV CLv1-2 (SEQ ID NO: 172 of U.S. Pat. No. 8,734,809), AAV CLv1-3 (SEQ ID NO: 173 of U.S. Pat. No. 8,734,809), AAV CLv1-4 (SEQ ID NO: 174 of U.S. Pat. No. 8,734,809), AAV Clv1-7 (SEQ ID NO: 175 of U.S. Pat. No. 8,734,809), AAV Clv1-8 (SEQ ID NO: 176 of U.S. Pat. No. 8,734,809), AAV Clv1-9 (SEQ ID NO: 177 of U.S. Pat. No. 8,734,809), AAV Clv1-10 (SEQ ID NO: 178 of U.S. Pat. No. 8,734,809), AAV.VR-355 (SEQ ID NO: 181 of U.S. Pat. No. 8,734,809), AAV.hu.48R3 (SEQ ID NO: 183 of U.S. Pat. No. 8,734,809), or variants or derivatives thereof.

[0439] In some embodiments, the AAV serotype may be, or have, a sequence as described in International Publication No. WO2016065001, the contents of which are herein incorporated by reference in their entirety, such as, but not limited to AAV CHt-P2 (SEQ ID NO: 1 and 51 of WO2016065001), AAV CHt-P5 (SEQ ID NO: 2 and 52 of WO2016065001), AAV CHt-P9 (SEQ ID NO: 3 and 53 of WO2016065001), AAV CBr-7.1 (SEQ ID NO: 4 and 54 of WO2016065001), AAV CBr-7.2 (SEQ ID NO: 5 and 55 of WO2016065001), AAV CBr-7.3 (SEQ ID NO: 6 and 56 of WO2016065001), AAV CBr-7.4 (SEQ ID NO: 7 and 57 of WO2016065001), AAV CBr-7.5 (SEQ ID NO: 8 and 58 of WO2016065001), AAV CBr-7.7 (SEQ ID NO: 9 and 59 of WO2016065001), AAV CBr-7.8 (SEQ ID NO: 10 and 60 of WO2016065001), AAV CBr-7.10 (SEQ ID NO: 11 and 61 of WO2016065001), AAV CKd-N3 (SEQ ID NO: 12 and 62 of WO2016065001), AAV CKd-N4 (SEQ ID NO: 13 and 63 of WO2016065001), AAV CKd-N9 (SEQ ID NO: 14 and 64 of WO2016065001), AAV CLv-L4 (SEQ ID NO: 15 and 65 of WO2016065001), AAV CLv-L5 (SEQ ID NO: 16 and 66 of WO2016065001), AAV CLv-L6 (SEQ ID NO: 17 and 67 of WO2016065001), AAV CLv-K1 (SEQ ID NO: 18 and 68 of WO2016065001), AAV CLv-K3 (SEQ ID NO: 19 and 69 of WO2016065001), AAV CLv-K6 (SEQ ID NO: 20 and 70 of WO2016065001), AAV CLv-M1 (SEQ ID NO: 21 and 71 of WO2016065001), AAV CLv-M11 (SEQ ID NO: 22 and 72 of WO2016065001), AAV CLv-M2 (SEQ ID NO: 23 and 73 of WO2016065001), AAV CLv-M5 (SEQ ID NO: 24 and 74 of WO2016065001), AAV CLv-M6 (SEQ ID NO: 25 and 75 of WO2016065001), AAV CLv-M7 (SEQ ID NO: 26 and 76 of WO2016065001), AAV CLv-M8 (SEQ ID NO: 27 and 77 of WO2016065001), AAV CLv-M9 (SEQ ID NO: 28 and 78 of WO2016065001), AAV CHt-P1 (SEQ ID NO: 29 and 79 of WO2016065001), AAV CHt-P6 (SEQ ID NO: 30 and 80 of WO2016065001), AAV CHt-P8 (SEQ ID NO: 31 and 81 of WO2016065001), AAV CHt-6.1 (SEQ ID NO: 32 and 82 of WO2016065001), AAV CHt-6.10 (SEQ ID NO: 33 and 83 of WO2016065001), AAV CHt-6.5 (SEQ ID NO: 34 and 84 of WO2016065001), AAV CHt-6.6 (SEQ ID NO: 35 and 85 of WO2016065001), AAV CHt-6.7 (SEQ ID NO: 36 and 86 of WO2016065001), AAV CHt-6.8 (SEQ ID NO: 37 and 87 of WO2016065001), AAV CSp-8.10 (SEQ ID NO: 38 and 88 of WO2016065001), AAV CSp-8.2 (SEQ ID NO: 39 and 89 of WO2016065001), AAV CSp-8.4 (SEQ ID NO: 40 and 90 of WO2016065001), AAV CSp-8.5 (SEQ ID NO: 41 and 91 of WO2016065001), AAV CSp-8.6 (SEQ ID NO: 42 and 92 of WO2016065001), AAV CSp-8.7 (SEQ ID NO: 43 and 93 of WO2016065001), AAV CSp-8.8 (SEQ ID NO: 44 and 94 of WO2016065001), AAV CSp-8.9 (SEQ ID NO: 45 and 95 of WO2016065001), AAV CBr-B7.3 (SEQ ID NO: 46 and 96 of WO2016065001), AAV CBr-B7.4 (SEQ ID NO: 47 and 97 of WO2016065001), AAV3B (SEQ ID NO: 48 and 98 of WO2016065001), AAV4 (SEQ ID NO: 49 and 99 of WO2016065001), AAV5 (SEQ ID NO: 50 and 100 of WO2016065001), or variants or derivatives thereof.

[0440] In some embodiments, the AAV particle may have, or may be a serotype selected from any of those found in Table 1.

[0441] In some embodiments, the AAV capsid may comprise a sequence, fragment or variant thereof, of any of the sequences in Table 1.

[0442] In some embodiments, the AAV capsid may be encoded by a sequence, fragment or variant as described in Table 1.

[0443] In any of the DNA and RNA sequences referenced and/or described herein, the single letter symbol has the following description: A for adenine; C for cytosine; G for guanine; T for thymine; U for Uracil; W for weak bases such as adenine or thymine; S for strong nucleotides such as cytosine and guanine; M for amino nucleotides such as adenine and cytosine; K for keto nucleotides such as guanine and thymine; R for purines adenine and guanine; Y for pyrimidine cytosine and thymine; B for any base that is not A (e.g., cytosine, guanine, and thymine); D for any base that is not C (e.g., adenine, guanine, and thymine); H for any base that is not G (e.g., adenine, cytosine, and thymine); V for any base that is not T (e.g., adenine, cytosine, and guanine); N for any nucleotide (which is not a gap); and Z is for zero.

[0444] In any of the amino acid sequences referenced and/or described herein, the single letter symbol has the following description: G (Gly) for Glycine; A (Ala) for Alanine; L (Leu) for Leucine; M (Met) for Methionine; F (Phe) for Phenylalanine; W (Trp) for Tryptophan; K (Lys) for Lysine; Q (Gln) for Glutamine; E (Glu) for Glutamic Acid; S (Ser) for Serine; P (Pro) for Proline; V (Val) for Valine; I (Ile) for Isoleucine; C (Cys) for Cysteine; Y (Tyr) for Tyrosine; H (His) for Histidine; R (Arg) for Arginine; N (Asn) for Asparagine; D (Asp) for Aspartic Acid; T (Thr) for Threonine; B (Asx) for Aspartic acid or Asparagine; J (Xle) for Leucine or Isoleucine; O (Pyl) for Pyrrolysine; U (Sec) for Selenocysteine; X (Xaa) for any amino acid; and Z (Glx) for Glutamine or Glutamic acid.

TABLE 1
AAV Serotypes

| | SEQ | |
|---|---|---|
| Serotype | ID NO: | Reference Information |
| VOY101 | 1 | — |
| VOY101 | 2 | — |
| VOY201 | 3 | — |
| PHP.N/PHP.B-DGT | 4 | WO2017100671 SEQ ID NO: 46 |
| AAVPHP.B or | 5 | WO2015038958 SEQ ID NO: 8 and 13 |
| G2B-26 | | |
| AAVPHP.B | 6 | WO2015038958 SEQ ID NO: 9 |
| AAV5 | 102 | U.S. Pat. No. 7,427,396 SEQ ID NO: 1 |
| AAV5 | 103 | US20030138772 SEQ ID NO: 114 |
| AAV5 | 104 | US20160017295 SEQ ID NO: 5, |
| | | U.S. Pat. No. 7,427,396 SEQ ID NO: 2, |
| | | US20150315612 SEQ ID NO: 216 |
| AAV5 | 105 | US20150315612 SEQ ID NO: 199 |
| AAV9 | 132 | US20030138772 SEQ ID NO: 5 |
| AAV9 | 133 | U.S. Pat. No. 7,198,951 SEQ ID NO: 1 |
| AAV9 | 134 | US20160017295 SEQ ID NO: 9 |
| AAV9 | 135 | US20030138772 SEQ ID NO: 100, |
| | | U.S. Pat. No. 7,198,951 SEQ ID NO: 2 |
| AAV9 | 136 | U.S. Pat. No. 7,198,951 SEQ ID NO: 3 |
| AAV9 (AAVhu.14) | 137 | U.S. Pat. No. 7,906,111 SEQ ID NO: 3; |
| | | WO2015038958 SEQ ID NO: 11 |
| AAV9 (AAVhu.14) | 138 | U.S. Pat. No. 7,906,111 SEQ ID NO: |
| | | 123; WO2015038958 SEQ ID NO: 2 |
| AAVrh.10 | 399 | US20150159173 SEQ ID NO: 9 |
| AAVrh.10 | 400 | US20150159173 SEQ ID NO: 25 |
| AAV5 | 878 | WO2016065001 SEQ ID NO: 100 |
| AAV9 | 996 | WO2016073739A1 SEQ ID NO: 3 |
| AAV2 | 1260 | WO2016134375A1 SEQ ID NO: 9 |
| AAV2 | 1261 | WO2016134375A1 SEQ ID NO: 10 |

[0445] In some embodiments, the AAV serotype may be, or may have a sequence as described in International Patent Publication WO2015038958, the contents of which are herein incorporated by reference in their entirety, such as, but not limited to, AAV9 (SEQ ID NO: 11 and 2 of WO2015038958 or SEQ ID NO: 137 and 138 respectively herein), PHP.B (SEQ ID NO: 8 and 9 of WO2015038958, herein SEQ ID NO: 5 and 6), G2B-13 (SEQ ID NO: 12 of WO2015038958, herein SEQ ID NO: 7), G2B-26 (SEQ ID NO: 13 of WO2015038958, herein SEQ ID NO: 5), TH1.1-32 (SEQ ID NO: 14 of WO2015038958, herein SEQ ID NO: 8), TH1.1-35 (SEQ ID NO: 15 of WO2015038958, herein SEQ ID NO: 9), AAV5 (SEQ ID Nos: 199 and 216 of US20150315612, herein SEQ ID NOs: 105 and 104, respectively), or variants thereof.

[0446] In some embodiments, an AAV particle described herein comprises an AAV capsid protein comprising an amino acid sequence provided in WO 2021/230987, e.g., in Table 4 or 6 of WO 2021/230987, the contents of which are hereby incorporated by reference in their entirety.

[0447] In some embodiments the AAV serotype of an AAV particle, e.g., an AAV particle for the vectorized delivery of a GBA1 protein described herein, is AAV9 or AAV5, or a variant of AAV5 or a variant of AAV9. In some embodiments, the AAV particle comprises an AAV5 capsid variant. In some embodiments, the AAV particle comprises an AAV9 capsid variant.

[0448] In some embodiments, the AAV particle, e.g., a recombinant AAV particle described herein, comprises an AAV9 capsid protein. In some embodiments, the AAV9 capsid protein comprises the amino acid sequence of SEQ ID NO: 138. In some embodiments, the nucleic acid sequence encoding the AAV9 capsid protein comprises the nucleotide sequence of SEQ ID NO: 137. In some embodiments, the AAV9 capsid protein comprises an amino acid sequence at least 70% identical to SEQ ID NO: 138, such as, at least 70% identical to, such as, at least 70%, at least 75%, at least 80%, at least 85%, at least 90%, at least 91%, at least 92%, at least 93%, at least 94%, at least 95%, at least 96%, at least 97%, at least 98%, at least 99%, or 100% identical to SEQ ID NO: 138. In some embodiments, the nucleic acid sequence encoding the AAV9 capsid protein comprises a nucleotide sequence at least 70% identical to SEQ ID NO: 137, such as, at least 70% identical to, such as, at least 70%, at least 75%, at least 80%, at least 85%, at least 90%, at least 91%, at least 92%, at least 93%, at least 94%, at least 95%, at least 96%, at least 97%, at least 98%, at least 99%, or 100% identical to, SEQ ID NO: 137.

[0449] In some embodiments, the AAV particle, e.g., a recombinant AAV particle described herein, comprises an AAV5 capsid protein. In some embodiments, the AAV5 capsid protein comprises the amino acid sequence of SEQ ID NO: 104. In some embodiments, the nucleic acid sequence encoding the AAV5 capsid protein is encoded by the nucleotide sequence of SEQ ID NO: 105. In some embodiments, the AAV5 capsid protein comprises an amino acid sequence at least 70% identical to SEQ ID NO: 104, such as, at least 70% identical to, such as, at least 70%, at least 75%, at least 80%, at least 85%, at least 90%, at least 91%, at least 92%, at least 93%, at least 94%, at least 95%, at least 96%, at least 97%, at least 98%, at least 99%, or 100% identical to, SEQ ID NO: 104. In some embodiments, the nucleic acid sequence encoding the AAV5 capsid protein is encoded by a nucleotide sequence at least 70% identical to SEQ ID NO: 105, such as, at least 70%, at least 75%, at least 80%, at least 85%, at least 90%, at least 91%, at least 92%, at least 93%, at least 94%, at least 95%, at least 96%, at least 97%, at least 98%, at least 99%, or 100% identical to, SEQ ID NO: 105.

[0450] In some embodiments, the AAV capsid of an AAV particle, e.g., an AAV particle for the vectorized delivery of a GBA1 protein described herein, allows for blood brain barrier penetration following intravenous administration. Non-limiting examples of such AAV capsids include AAV9, AAV9 K449R, AAV5, VOY101, VOY201, or AAV capsids comprising a peptide insert such as, but not limited to, AAVPHP.N (PHP.N), AAVPHP.B (PHP.B), PHP.S, G2A3, G2B4, G2B5, G2A12, G2A15, PHP.B2, PHP.B3, AAV2.BR1, or AAVPHP.A (PHP.A).

[0451] In some embodiments, the AAV capsid is an AAV9 comprising an insert comprising the amino acid sequence PLNGAVHLY (SEQ ID NO: 3648), wherein the amino acid sequence of PLNGAVHLY (SEQ ID NO: 3648) is present immediately subsequent to position 586, relative to a reference sequence numbered according to the amino acid sequence of SEQ ID NO: 138. In some embodiments, the AAV capsid comprises the amino acid sequence of 3636. In some embodiments SEQ ID NO: 3636 comprises the amino acid sequence:

(SEQ ID NO: 3636)
MAADGYLPDWLEDNLSEGIREWWALKPGAPQPKANQQHQDNARGLVLPGYKYLGPGNGLDKGEPVNAADA
AALEHDKAYDQQLKAGDNPYLKYNHADAEFQERLKEDTSFGGNLGRAVFQAKKRLLEPLGLVEEAAKTAP
GKKRPVEQSPQEPDSSAGIGKSGAQPAKKRLNFGQTGDTESVPDPQPIGEPPAAPSGVGSLTMASGGGAP
VADNNEGADGVGSSSGNWHCDSQWLGDRVITTSTRTWALPTYNNHLYKQISNSTSGGSSNDNAYFGYSTP
WGYFDFNRFHCHFSPRDWQRLINNNWGFRPKRLNFKLFNIQVKEVTDNNGVKTIANNLTSTVQVFTDSDY
QLPYVLGSAHEGCLPPFPADVFMIPQYGYLTLNDGSQAVGRSSFYCLEYFPSQMLRTGNNFQFSYEFENV
PFHSSYAHSQSLDRLMNPLIDQYLYYLSKTINGSGQNQQTLKFSVAGPSNMAVOGRNYIPGPSYRQQRVS
TTVTQNNNSEFAWPGASSWALNGRNSLMNPGPAMASHKEGEDRFFPLSGSLIFGKQGTGRDNVDADKVMI
TNEEEIKTTNPVATESYGQVATNHQSPLNGAVHLYAQAQTGWVQNQGILPGMVWQDRDVYLQGPIWAKIP
HTDGNFHPSPLMGGFGMKHPPPQILIKNTPVPADPPTAFNKDKLNSFITQYSTGQVSVEIEWELQKENSK
RWNPEIQYTSNYYKSNNVEFAVNTEGVYSEPRPIGTRYLTRNL.

[0452] In some embodiments, the AAV serotype is selected for use due to its tropism for cells of the central nervous system. In some embodiments, the cells of the central nervous system are neurons. In another embodiment, the cells of the central nervous system are astrocytes.

[0453] In some embodiments, the AAV serotype is selected for use due to its tropism for cells of the muscle(s).

[0454] In some embodiments, the initiation codon for translation of the AAV VP1 capsid protein may be CTG, TTG, or GTG as described in U.S. Pat. No. 8,163,543, the contents of which are herein incorporated by reference in their entirety. In some embodiments, the nucleotide sequence encoding the capsid protein, e.g., a VP1 capsid protein, comprises 3-20 mutations (e.g., substitutions), e.g., 3-15 mutations, 3-10 mutations, 3-5 mutations, 5-20 mutations, 5-15 mutations, 5-10 mutations, 10-20 mutations, 10-15 mutations, 15-20 mutations, 3 mutations, 5 mutations, 10 mutations, 12 mutations, 15 mutations, 18 mutations, or 20 mutations, relative to the nucleotide sequence of SEQ ID NO: 137.

[0455] The present disclosure refers to structural capsid proteins (including VP1, VP2 and VP3) which are encoded by capsid (Cap) genes. These capsid proteins form an outer protein structural shell (i.e. capsid) of a viral vector such as AAV. VP capsid proteins synthesized from Cap polynucleotides generally include a methionine as the first amino acid in the peptide sequence (Met1), which is associated with the start codon (AUG or ATG) in the corresponding Cap nucleotide sequence. However, it is common for a first-methionine (Met1) residue or generally any first amino acid (AA1) to be cleaved off after or during polypeptide synthesis by protein processing enzymes such as Met-aminopeptidases. This “Met/AA-clipping” process often correlates with a corresponding acetylation of the second amino acid in the polypeptide sequence (e.g., alanine, valine, serine, threonine, etc.). Met-clipping commonly occurs with VP1 and VP3 capsid proteins but can also occur with VP2 capsid proteins.

[0456] Where the Met/AA-clipping is incomplete, a mixture of one or more (one, two or three) VP capsid proteins comprising the viral capsid may be produced, some of which may include a Met1/AA1 amino acid (Met+/AA+) and some of which may lack a Met1/AA1 amino acid as a result of Met/AA-clipping (Met−/AA−). For further discussion regarding Met/AA-clipping in capsid proteins, see Jin, et al. Direct Liquid Chromatography/Mass Spectrometry Analysis for Complete Characterization of Recombinant Adeno-Associated Virus Capsid Proteins. Hum Gene Ther Methods. 2017 Oct. 28 (5): 255-267; Hwang, et al. N-Terminal Acetylation of Cellular Proteins Creates Specific Degradation Signals. Science. 2010 Feb. 19. 327 (5968): 973-977; the contents of which are each incorporated herein by reference in their entirety.

[0457] According to the present disclosure, references to capsid proteins is not limited to either clipped (Met−/AA−) or unclipped (Met+/AA+) and may, in context, refer to independent capsid proteins, viral capsids comprised of a mixture of capsid proteins, and/or polynucleotide sequences (or fragments thereof) which encode, describe, produce or result in capsid proteins of the present disclosure. A direct reference to a “capsid protein” or “capsid polypeptide” (such as VP1, VP2 or VP2) may also comprise VP capsid proteins which include a Met1/AA1 amino acid (Met+/AA+) as well as corresponding VP capsid proteins which lack the Met1/AA1 amino acid as a result of Met/AA-clipping (Met−/AA−).

[0458] Further according to the present disclosure, a reference to a specific “SEQ ID NO:” (whether a protein or nucleic acid) which comprises or encodes, respectively, one or more capsid proteins which include a Met1/AA1 amino acid (Met+/AA+) should be understood to teach the VP capsid proteins which lack the Met1/AA1 amino acid as upon review of the sequence, it is readily apparent any sequence which merely lacks the first listed amino acid (whether or not Met1/AA1).

[0459] As a non-limiting example, reference to a VP1 polypeptide sequence which is 736 amino acids in length and which includes a “Met1” amino acid (Met+) encoded by the AUG/ATG start codon may also be understood to teach a VP1 polypeptide sequence which is 735 amino acids in length and which does not include the “Met1” amino acid (Met−) of the 736 amino acid Met+ sequence. As a second non-limiting example, reference to a VP1 polypeptide sequence which is 736 amino acids in length and which includes an “AA1” amino acid (AA1+) encoded by any NNN initiator codon may also be understood to teach a VP1 polypeptide sequence which is 735 amino acids in length and which does not include the “AA1” amino acid (AA1−) of the 736 amino acid AA1+ sequence.

[0460] References to viral capsids formed from VP capsid proteins (such as reference to specific AAV capsid serotypes), can incorporate VP capsid proteins which include a Met1/AA1 amino acid (Met+/AA1+), corresponding VP capsid proteins which lack the Met1/AA1 amino acid as a result of Met/AA1-clipping (Met−/AA1−), and combinations thereof (Met+/AA1+ and Met−/AA1−).

[0461] As a non-limiting example, an AAV capsid serotype can include VP1 (Met+/AA1+), VP1 (Met−/AA1−), or a combination of VP1 (Met+/AA1+) and VP1 (Met−/AA1−). An AAV capsid serotype can also include VP3 (Met+/AA1+), VP3 (Met−/AA1−), or a combination of VP3 (Met+/AA1+) and VP3 (Met−/AA1−); and can also include similar optional combinations of VP2 (Met+/AA1) and VP2 (Met−/AA1−).

### AAV Viral Genome

[0462] In some aspects, the AAV particle of the present disclosure serves as an expression vector comprising a viral genome which encodes a GCase protein. The viral genome can encode a GCase protein and an enhancement, e.g., prosaposin (PSAP) or sapsosin (Sap) polypeptide or functional variant thereof (e.g., a SapA protein or a SapC protein), a cell penetrating peptide (e.g., an ApoEII peptide, a TAT peptide, or an ApoB peptide), a lysosomal targeting sequence (LTS), or a combination thereof. In some embodiments, expression vectors are not limited to AAV and may be adenovirus, retrovirus, lentivirus, plasmid, vector, or any variant thereof.

[0463] In some embodiments, an AAV particle, e.g., an AAV particle for the vectorized delivery of a GBA1 protein described herein, comprises a viral genome, e.g., an AAV viral genome (e.g., a vector genome or AAV vector genome). In some embodiments, the viral genome, e.g., the AAV viral genome, further comprises an inverted terminal repeat (ITR) region, an enhancer, a promoter, an intron region, a Kozak sequence, an exon region, a nucleic acid encoding a transgene encoding a payload (e.g., a GBA1 protein described herein) with or without an enhancement element, a nucleotide sequence encoding at least one miR binding site (e.g., at least one miR183 binding site), a poly A signal region, or a combination thereof.

### Viral Genome Component: Inverted Terminal Repeats (ITRs)

[0464] In some embodiments, the viral genome may comprise at least one inverted terminal repeat (ITR) region. The AAV particles of the present disclosure comprise a viral genome with at least one ITR region and a payload region. In some embodiments, the viral genome has two ITRs. These two ITRs flank the payload region at the 5′ and 3′ ends. In some embodiments, the ITR functions as an origin of replication comprising a recognition site for replication. In some embodiments, the ITR comprises a sequence region which can be complementary and symmetrically arranged. In some embodiments, the ITR incorporated into a viral genome described herein may be comprised of a naturally occurring polynucleotide sequence or a recombinantly derived polynucleotide sequence.

[0465] The ITRs may be derived from the same serotype as the capsid, selected from any of the serotypes listed in Table 1, or a derivative thereof. The ITR may be of a different serotype than the capsid. In some embodiments, the AAV particle has more than one ITR. In a non-limiting example, the AAV particle has a viral genome comprising two ITRs. In some embodiments, the ITRs are of the same serotype as one another. In another embodiment, the ITRs are of different serotypes. Non-limiting examples include zero, one or both of the ITRs having the same serotype as the capsid. In some embodiments both ITRs of the viral genome of the AAV particle are AAV2 ITRs.

[0466] Independently, each ITR may be about 100 to about 150 nucleotides in length. In some embodiments, the ITR comprises 100-180 nucleotides in length, e.g., about 100-115, about 100-120, about 100-130, about 100-140, about 100-150, about 100-160, about 100-170, about 100-180, about 110-120, about 110-130, about 110-140, about 110-150, about 110-160, about 110-170, about 110-180, about 120-130, about 120-140, about 120-150, about 120-160, about 120-170, about 120-180, about 130-140, about 130-150, about 130-160, about 130-170, about 130-180, about 140-150, about 140-160, about 140-170, about 140-180, about 150-160, about 150-170, about 150-180, about 160-170, about 160-180, or about 170-180 nucleotides in length. In some embodiments, the ITR comprises about 120-140 nucleotides in length, e.g., about 130 nucleotides in length. In some embodiments, the ITRs are 140-142 nucleotides in length, e.g., 141 nucleotides in length. In some embodiments, the ITR comprises 1205-135 nucleotides in length, e.g., 130 nucleotides in length. Non-limiting examples of ITR length are 102, 130, 140, 141, 142, 145 nucleotides in length, and those having at least 95% identity thereto.

[0467] In some embodiments, each ITR is 141 nucleotides in length. In some embodiments, each ITR is 130 nucleotides in length. In some embodiments, the AAV particles comprise two ITRs and one ITR is 141 nucleotides in length and the other ITR is 130 nucleotides in length.

[0468] In some embodiments, the ITR comprises the nucleotide sequence of any one of SEQ ID NOs: 1829, 1830, or 1862, or a nucleotide sequence substantially identical (e.g., at least 70%, at least 75%, at least 80%, at least 85%, at least 90%, at least 91%, at least 92%, at least 93%, at least 94%, at least 95%, at least 96%, at least 97%, at least 98%, at least 99% identical, or 100% identical to) to any of the aforesaid sequences. In some embodiments, the ITR comprises the nucleotide sequence of any of SEQ ID NOs: 1860, 1861, 1863, or 1864, or a nucleotide sequence having one, two, or three but no more than four modifications, e.g., substitutions, relative to SEQ ID NOs: 1860, 1861, 1863, or 1864.

### Viral Genome Component: Promoters and Expression Enhancers

[0469] In some embodiments, the payload region of the viral genome comprises at least one element to enhance the transgene target specificity and expression. See, e.g., Powell et al. Viral Expression Cassette Elements to Enhance Transgene Target Specificity and Expression in Gene Therapy, 2015; the contents of which are herein incorporated by reference in their entirety. Non-limiting examples of elements to enhance the transgene target specificity and expression include promoters, endogenous miRNAs, post-transcriptional regulatory elements (PREs), polyadenylation (PolyA) signal sequences, upstream enhancers (USEs), CMV enhancers, and introns.

[0470] In some embodiments, expression of the polypeptides in a target cell may be driven by a specific promoter, including but not limited to, a promoter that is species specific, inducible, tissue-specific, or cell cycle-specific (Parr et al., Nat. Med. 3:1145-9 (1997); the contents of which are herein incorporated by reference in their entirety).

[0471] In some embodiments, the viral genome provides expression of a GBA1 protein in a target tissue (e.g., the CNS). In some embodiments, the promoter is deemed to be efficient when it drives expression of the polypeptide(s) encoded in the payload region of the viral genome of the AAV particle.

[0472] In some embodiments, the promoter is a promoter deemed to be efficient when it drives expression in the cell or tissue being targeted (e.g., the CNS).

[0473] In some embodiments, the promoter drives expression of the GCase, GCase and SapA, or GCase and SapC protein(s) for a period of time in targeted tissues. Expression driven by a promoter may be for a period of 1 hour, 2, hours, 3 hours, 4 hours, 5 hours, 6 hours, 7 hours, 8 hours, 9 hours, 10 hours, 11 hours, 12 hours, 13 hours, 14 hours, 15 hours, 16 hours, 17 hours, 18 hours, 19 hours, 20 hours, 21 hours, 22 hours, 23 hours, 1 day, 2 days, 3 days, 4 days, 5 days, 6 days, 1 week, 8 days, 9 days, 10 days, 11 days, 12 days, 13 days, 2 weeks, 15 days, 16 days, 17 days, 18 days, 19 days, 20 days, 3 weeks, 22 days, 23 days, 24 days, 25 days, 26 days, 27 days, 28 days, 29 days, 30 days, 31 days, 1 month, 2 months, 3 months, 4 months, 5 months, 6 months, 7 months, 8 months, 9 months, 10 months, 11 months, 1 year, 13 months, 14 months, 15 months, 16 months, 17 months, 18 months, 19 months, 20 months, 21 months, 22 months, 23 months, 2 years, 3 years, 4 years, 5 years, 6 years, 7 years, 8 years, 9 years, 10 years or more than 10 years. Expression may be for 1-5 hours, 1-12 hours, 1-2 days, 1-5 days, 1-2 weeks, 1-3 weeks, 1-4 weeks, 1-2 months, 1-4 months, 1-6 months, 2-6 months, 3-6 months, 3-9 months, 4-8 months, 6-12 months, 1-2 years, 1-5 years, 2-5 years, 3-6 years, 3-8 years, 4-8 years, or 5-10 years.

[0474] In some embodiments, the promoter drives expression of a polypeptide (e.g., a GCase polypeptide, a GCase polypeptide and a prosaposin (PSAP) polypeptide, a GCase polypeptide and a SapA polypeptide, a GCase polypeptide and a SapC polypeptide, a GCase polypeptide and a cell penetrating peptide (e.g., an ApoEII peptide, a TAT peptide, and/or a ApoB peptide), or a GCase polypeptide and a lysosomal targeting peptide) for at least 1 month, 2 months, 3 months, 4 months, 5 months, 6 months, 7 months, 8 months, 9 months, 10 months, 11 months, 1 year, 2 years, 3 years 4 years, 5 years, 6 years, 7 years, 8 years, 9 years, 10 years, 11 years, 12 years, 13 years, 14 years, 15 years, 16 years, 17 years, 18 years, 19 years, 20 years, 21 years, 22 years, 23 years, 24 years, 25 years, 26 years, 27 years, 28 years, 29 years, 30 years, 31 years, 32 years, 33 years, 34 years, 35 years, 36 years, 37 years, 38 years, 39 years, 40 years, 41 years, 42 years, 43 years, 44 years, 45 years, 46 years, 47 years, 48 years, 49 years, 50 years, 55 years, 60 years, 65 years, or more than 65 years.

[0475] Promoters may be naturally occurring or non-naturally occurring. Non-limiting examples of promoters include viral promoters, plant promoters and mammalian promoters. In some embodiments, the promoters may be human promoters. In some embodiments, the promoter may be truncated.

[0476] In some embodiments, the viral genome comprises a promoter that results in expression in one or more, e.g., multiple, cells and/or tissues, e.g., a ubiquitous promoter. In some embodiments, a promoter which drives or promotes expression in most mammalian tissues includes, but is not limited to, human elongation factor 1α-subunit (EF1α), cytomegalovirus (CMV) immediate-early enhancer and/or promoter, chicken β-actin (CBA) and its derivative CAG, β glucuronidase (GUSB), and ubiquitin C (UBC). Tissue-specific expression elements can be used to restrict expression to certain cell types such as, but not limited to, CNS-specific promoters, B cell promoters, monocyte promoters, leukocyte promoters, macrophage promoters, pancreatic acinar cell promoters, endothelial cell promoters, lung tissue promoters, astrocyte promoters, or various specific nervous system cell- or tissue-type promoters which can be used to restrict expression to neurons, astrocytes, or oligodendrocytes, for example.

[0477] In some embodiments, the viral genome comprises a nervous system specific promoter, e.g., a promoter that results in expression of a payload in a neuron, an astrocyte, and/or an oligodendrocyte. Non-limiting examples of tissue-specific expression elements for neurons include neuron-specific enolase (NSE), platelet-derived growth factor (PDGF), platelet-derived growth factor B-chain (PDGF-β), synapsin (Syn), synapsin 1 (Syn1), methyl-CpG binding protein 2 (MeCP2), Ca²⁺/calmodulin-dependent protein kinase II (CaMKII), metabotropic glutamate receptor 2 (mGluR2), neurofilament light (NFL) or heavy (NFH), β-globin minigene nβ2, preproenkephalin (PPE), enkephalin (Enk) and excitatory amino acid transporter 2 (EAAT2) promoters. Non-limiting examples of tissue-specific expression elements for astrocytes include glial fibrillary acidic protein (GFAP) and EAAT2 promoters. A non-limiting example of a tissue-specific expression element for oligodendrocytes includes the myelin basic protein (MBP) promoter. Prion promoter represents an additional tissue specific promoter useful for driving protein expression in CNS tissue (see Loftus, Stacie K., et al. Human molecular genetics 11.24 (2002): 3107-3114, the disclosure of which is incorporated by reference in its entirety).

[0478] In some embodiments, the promoter may be less than 1 kb. The promoter may have a length of 200, 210, 220, 230, 240, 250, 260, 270, 280, 290, 300, 310, 320, 330, 340, 350, 360, 370, 380, 390, 400, 410, 420, 430, 440, 450, 460, 470, 480, 490, 500, 510, 520, 530, 540, 550, 560, 570, 580, 590, 600, 610, 620, 630, 640, 650, 660, 670, 680, 690, 700, 710, 720, 730, 740, 750, 760, 770, 780, 790, 800, or more than 800 nucleotides. The promoter may have a length of 200-300, 200-400, 200-500, 200-600, 200-700, 200-800, 300-400, 300-500, 300-600, 300-700, 300-800, 400-500, 400-600, 400-700, 400-800, 500-600, 500-700, 500-800, 600-700, 600-800, or 700-800 nucleotides.

[0479] In some embodiments, the promoter may be a combination of two or more components of the same or different starting or parental promoters such as, but not limited to, CMV and CBA. Each component may have a length of 200, 210, 220, 230, 240, 250, 260, 270, 280, 290, 300, 310, 320, 330, 340, 350, 360, 370, 380, 381, 382, 383, 384, 385, 386, 387, 388, 389, 390, 400, 410, 420, 430, 440, 450, 460, 470, 480, 490, 500, 510, 520, 530, 540, 550, 560, 570, 580, 590, 600, 610, 620, 630, 640, 650, 660, 670, 680, 690, 700, 710, 720, 730, 740, 750, 760, 770, 780, 790, 800, or more than 800 nucleotides. Each component may have a length of 200-300, 200-400, 200-500, 200-600, 200-700, 200-800, 300-400, 300-500, 300-600, 300-700, 300-800, 400-500, 400-600, 400-700, 400-800, 500-600, 500-700, 500-800, 600-700, 600-800 or 700-800 nucleotides. In some embodiments, the promoter is a combination of a 382 nucleotide CMV-enhancer sequence and a 260 nucleotide CBA-promoter sequence. In some embodiments, the promoter is a combination of a 380 nucleotide CMV-enhancer sequence (e.g., comprising the nucleotide sequence of SEQ ID NO: 1831) and a 260 nucleotide CBA-promoter sequence (e.g., comprising the nucleotide sequence of SEQ ID NO: 1834).

[0480] In some embodiments, the viral genome comprises a ubiquitous promoter. Non-limiting examples of ubiquitous promoters include CMV, CBA (including derivatives CAG, CB6, CBh, etc.), EF-1α, PGK, UBC, GUSB (hGBp), and UCOE (promoter of HNRPA2B1-CBX3). In some embodiments, the viral genome comprises an EF-1α promoter or EF-1α promoter variant.

[0481] In some embodiments, the promoter is a ubiquitous promoter as described in Yu et al. (Molecular Pain 2011, 7:63), Soderblom et al. (E. Neuro 2015), Gill et al., (Gene Therapy 2001, Vol. 8, 1539-1546), and Husain et al. (Gene Therapy 2009), each of which are incorporated by reference in their entirety.

[0482] In some embodiments, the promoter is not cell specific.

[0483] In some embodiments, the promoter is a ubiquitin c (UBC) promoter. The UBC promoter may have a size of 300-350 nucleotides. As a non-limiting example, the UBC promoter is 332 nucleotides. In some embodiments, the promoter is a β-glucuronidase (GUSB) promoter. The GUSB promoter may have a size of 350-400 nucleotides. As a non-limiting example, the GUSB promoter is 378 nucleotides. In some embodiments, the promoter is a neurofilament light (NFL) promoter. The NFL promoter may have a size of 600-700 nucleotides. As a non-limiting example, the NFL promoter is 650 nucleotides. In some embodiments, the promoter is a neurofilament heavy (NFH) promoter. The NFH promoter may have a size of 900-950 nucleotides. As a non-limiting example, the NFH promoter is 920 nucleotides. In some embodiments, the promoter is a scn8a promoter. The scn8a promoter may have a size of 450-500 nucleotides. As a non-limiting example, the scn8a promoter is 470 nucleotides.

[0484] In some embodiments, the promoter is a phosphoglycerate kinase 1 (PGK) promoter.

[0485] In some embodiments, the promoter is a chicken β-actin (CBA) promoter, or a functional variant thereof.

[0486] In some embodiments, the promoter is a CB6 promoter, or a functional variant thereof.

[0487] In some embodiments, the promoter is a CB promoter, or a functional variant thereof. In some embodiments, the promoter is a minimal CB promoter, or a functional variant thereof.

[0488] In some embodiments, the promoter is a CBA promoter, or functional variant thereof. In some embodiments, the promoter is a minimal CBA promoter, or functional variant thereof.

[0489] In some embodiments, the promoter is a cytomegalovirus (CMV) promoter, or a functional variant thereof.

[0490] In some embodiments, the promoter is a CAG promoter, or a functional variant thereof.

[0491] In some embodiments, the promoter is an EF1α promoter or functional variant thereof.

[0492] In some embodiments, the promoter is a GFAP promoter (as described, for example, in Zhang, Min, et al. Journal of neuroscience research 86.13 (2008): 2848-2856, the disclosure of which is incorporated by reference in its entirety) to drive expression of a GCase polypeptide, or a GCase polypeptide and an enhancement element (e.g., GCase and SapA, or GCase and SapC protein expression) in astrocytes.

[0493] In some embodiments, the promoter is a synapsin promoter, or a functional variant thereof.

[0494] In some embodiments, the promoter is an RNA pol III promoter. As a non-limiting example, the RNA pol III promoter is U6. As a non-limiting example, the RNA pol III promoter is H1.

[0495] In some embodiments, the viral genome comprises two promoters. As a non-limiting example, the promoters are an EF1α promoter and a CMV promoter.

[0496] In some embodiments, the viral genome comprises an enhancer element, a promoter and/or a 5′UTR intron. The enhancer element, also referred to herein as an “enhancer,” may be, but is not limited to, a CMV enhancer, the promoter may be, but is not limited to, a CMV, CBA, UBC, GUSB, NSE, Synapsin, MeCP2, and GFAP promoter and the 5′UTR/intron may be, but is not limited to, SV40, and CBA-MVM. As a non-limiting example, the enhancer, promoter and/or intron used in combination may be: (1) CMV enhancer, CMV promoter, SV40 5′UTR intron; (2) CMV enhancer, CBA promoter, SV 40 5′UTR intron; (3) CMV enhancer, CBA promoter, CBA-MVM 5′UTR intron; (4) UBC promoter; (5) GUSB promoter; (6) NSE promoter; (7) Synapsin promoter; (8) MeCP2 promoter; and (9) GFAP promoter.

[0497] In some embodiments, the viral genome comprises an enhancer. In some embodiments, the enhancer comprises a CMVie enhancer.

[0498] In some embodiments the viral genome comprises a CMVie enhancer and a CB promoter. In some embodiments, the viral genome comprises a CMVie enhancer and a CMV promoter (e.g., a CMV promoter region). In some embodiments, the viral genome comprises a CMVie enhancer, a CBA promoter or functional variant thereof, and an intron (e.g., a CAG promoter).

[0499] In some embodiments, the viral genome comprises an engineered promoter. In another embodiments, the viral genome comprises a promoter from a naturally expressed protein.

[0500] In some embodiments, a CBA promoter is used in a viral genomes of an AAV particle described herein, e.g., a viral genome encoding a GCase protein, or a GCase protein and an enhancement element (e.g., a GCase and SapA proteins, GCase and SapC proteins, or GCase protein and a cell penetrating peptide or variants thereof). In some embodiments, the CBA promoter is engineered for optimal expression of a GCase polypeptide or a GCase polypeptide and an enhancement element described herein (e.g., a prosaposin or saposin protein or variant thereof; a cell penetrating peptide or variant thereof; or a lysosomal targeting signal).

### Viral Genome Component: Introns

[0501] In some embodiments, the vector genome comprises at least one intron or a fragment or derivative thereof. In some embodiments, the at least one intron may enhance expression of a GCase protein and/or an enhancement element described herein (e.g., a prosaposin protein or a SapC protein or variant thereof; a cell penetrating peptide (e.g., a ApoEII peptide, a TAT peptide, or a ApoB peptide) or variant thereof; and/or a lysosomal targeting signal) (see e.g., Powell et al. Viral Expression Cassette Elements to Enhance Transgene Target Specificity and Expression in Gene Therapy, 2015; the contents of which are herein incorporated by reference in their entirety). Non-limiting examples of introns include, MVM (67-97 bps), F.IX truncated intron 1 (300 bps), β-globin SD/immunoglobulin heavy chain splice acceptor (250 bps), adenovirus splice donor/immunoglobin splice acceptor (500 bps), SV40 late splice donor/splice acceptor (19S/16S) (180 bps), and hybrid adenovirus splice donor/IgG splice acceptor (230 bps).

[0502] In some embodiments, the intron may be 100-500 nucleotides in length. The intron may have a length of 80, 90, 100, 110, 120, 130, 140, 150, 160, 170, 171, 172, 173, 174, 175, 176, 177, 178, 179, 180, 190, 200, 210, 220, 230, 240, 250, 260, 270, 280, 290, 300, 310, 320, 330, 340, 350, 360, 370, 380, 390, 400, 410, 420, 430, 440, 450, 460, 470, 480, 490 or 500 nucleotides. The intron may have a length between 80-100, 80-120, 80-140, 80-160, 80-180, 80-200, 80-250, 80-300, 80-350, 80-400, 80-450, 80-500, 200-300, 200-400, 200-500, 300-400, 300-500, or 400-500 nucleotides.

[0503] In some embodiments, the intron may be 100-600 nucleotides in length. In some embodiments, the intron is 566 nucleotides in length.

[0504] In some embodiments, the AAV vector may comprise an SV40 intron or fragment or variant thereof. In some embodiments, the promoter may be a CMV promoter. In some embodiments, the promoter may be CBA. In some embodiments, the promoter may be H1.

[0505] In some embodiments, the AAV vector may comprise a beta-globin intron or a fragment or variant thereof. In some embodiments, the intron comprises one or more human beta-globin sequences (e.g., including fragments/variants thereof). In some embodiments the promoter may be a CB promoter. In some embodiments, the promoter comprises a CMV promoter. In some embodiments, the promoter comprises a minimal CBA promoter.

[0506] In some embodiments, the encoded protein(s) may be located downstream of an intron in an expression vector such as, but not limited to, SV40 intron or beta globin intron or others known in the art. Further, the encoded GBA1 protein may also be located upstream of the polyadenylation sequence in an expression vector. In some embodiments, the encoded proteins may be located within 1, 2, 3, 4, 5, 6, 7, 8, 9, 10, 11, 12, 13, 14, 15, 16, 17, 18, 19, 20, 21, 22, 23, 24, 25, 26, 27, 28, 29, 30, or more than 30 nucleotides downstream from the promoter comprising an intron (e.g., 3′ relative to the promoter comprising an intron) and/or upstream of the polyadenylation sequence (e.g., 5′ relative to the polyadenylation sequence) in an expression vector. In some embodiments, the encoded GBA1 protein may be located within 1-5, 1-10, 1-15, 1-20, 1-25, 1-30, 5-10, 5-15, 5-20, 5-25, 5-30, 10-15, 10-20, 10-25, 10-30, 15-20, 15-25, 15-30, 20-25, 20-30, or 25-30 nucleotides downstream from the intron (e.g., 3′ relative to the intron) and/or upstream of the polyadenylation sequence (e.g., 5′ relative to the polyadenylation sequence) in an expression vector. In some embodiments, the encoded proteins may be located within the first 1%, 2%, 3%, 4%, 5%, 6%, 7%, 8%, 9%, 10%, 15%, 20%, 25%, or more than 25% of the nucleotides downstream from the intron (e.g., 3′ relative to the intron) and/or upstream of the polyadenylation sequence (e.g., 5′ relative to the polyadenylation sequence) in an expression vector. In some embodiments, the encoded proteins may be located within the first 1-5%, 1-10%, 1-15%, 1-20%, 1-25%, 5-10%, 5-15%, 5-20%, 5-25%, 10-15%, 10-20%, 10-25%, 15-20%, 15-25%, or 20-25% of the sequence downstream from the intron (e.g., 3′ relative to the intron) and/or upstream of the polyadenylation sequence (e.g., 5′ relative to the polyadenylation sequence) in an expression vector.

[0507] In certain embodiments, the intron sequence is not an enhancer sequence. In some embodiments, the intron sequence is not a sub-component of a promoter sequence. In some embodiments, the intron sequence is a sub-component of a promoter sequence.

### Viral Genome Component: Untranslated Regions (UTRs)

[0508] In some embodiments, a wild type untranslated region (UTR) of a gene is transcribed but not translated. Generally, the 5′ UTR starts at the transcription start site and ends at the start codon and the 3′ UTR starts immediately following the stop codon and continues until the termination signal for transcription.

[0509] Features typically found in abundantly expressed genes of specific target organs may be engineered into UTRs to enhance the stability and protein production. As a non-limiting example, a 5′ UTR from mRNA normally expressed in the liver (e.g., albumin, serum amyloid A, Apolipoprotein A/B/E, transferrin, alpha fetoprotein, erythropoietin, or Factor VIII) may be used in the viral genomes of the AAV particles of the disclosure to enhance expression in hepatic cell lines or liver.

[0510] In some embodiments, the viral genome encoding a transgene described herein (e.g., a transgene encoding a GBA1 protein) comprises a Kozak sequence. While not wishing to be bound by theory, wild-type 5′ untranslated regions (UTRs) include features that play roles in translation initiation. Kozak sequences, which are commonly known to be involved in the process by which the ribosome initiates translation of many genes, are usually included in 5′ UTRs. Kozak sequences have the consensus CCR (A/G) CCAUGG, where R is a purine (adenine or guanine) three bases upstream of the start codon (ATG), which is followed by another ‘G’.

[0511] In some embodiments, the 5′UTR in the viral genome includes a Kozak sequence.

[0512] In some embodiments, the 5′UTR in the viral genome does not include a Kozak sequence.

[0513] While not wishing to be bound by theory, wild-type 3′ UTRs are known to have stretches of adenosines and uridines embedded therein. These AU rich signatures are particularly prevalent in genes with high rates of turnover. Based on their sequence features and functional properties, the AU rich elements (AREs) can be separated into three classes (Chen et al, 1995, the contents of which are herein incorporated by reference in their entirety): Class I AREs, such as, but not limited to, c-Myc and MyoD, contain several dispersed copies of an AUUUA motif within U-rich regions. Class II AREs, such as, but not limited to, GM-CSF and TNF-α, possess two or more overlapping UUAUUUA (U/A) (U/A) nonamers. Class III ARES, such as, but not limited to, c-Jun and Myogenin, are less well defined. These U rich regions do not contain an AUUUA motif. Most proteins binding to the AREs are known to destabilize the messenger, whereas members of the ELAV family, most notably HuR, have been documented to increase the stability of mRNA. HuR binds to AREs of all the three classes. Engineering the HuR specific binding sites into the 3′ UTR of nucleic acid molecules will lead to HuR binding and thus, stabilization of the message in vivo.

[0514] Introduction, removal or modification of 3′ UTR AU rich elements (AREs) can be used to modulate the stability of polynucleotides. When engineering specific polynucleotides, e.g., payload regions of viral genomes, one or more copies of an ARE can be introduced to make polynucleotides less stable and thereby curtail translation and decrease production of the resultant protein. Likewise, AREs can be identified and removed or mutated to increase the intracellular stability and thus increase translation and production of the resultant protein.

[0515] In some embodiments, the 3′ UTR of the viral genome may include an oligo (dT) sequence for templated addition of a poly-A tail.

[0516] Any UTR from any gene known in the art may be incorporated into the viral genome of the AAV particle. These UTRs, or portions thereof, may be placed in the same orientation as in the gene from which they were selected or they may be altered in orientation or location. In some embodiments, the UTR used in the viral genome of the AAV particle may be inverted, shortened, lengthened, or made with one or more other 5′ UTRs or 3′ UTRs known in the art. As used herein, the term “altered,” as it relates to a UTR, means that the UTR has been changed in some way in relation to a reference sequence. For example, a 3′ or 5′ UTR may be altered relative to a wild type or native UTR by the change in orientation or location as taught above or may be altered by the inclusion of additional nucleotides, deletion of nucleotides, swapping or transposition of nucleotides.

[0517] In some embodiments, the viral genome of the AAV particle comprises at least one artificial UTR, which is not a variant of a wild type UTR.

[0518] In some embodiments, the viral genome of the AAV particle comprises UTRs which have been selected from a family of transcripts whose proteins share a common function, structure, feature, or property.

### Viral Genome Component: miR Binding Site

[0519] Tissue- or cell-specific expression of the AAV viral particles of the invention can be enhanced by introducing tissue- or cell-specific regulatory sequences, e.g., promoters, enhancers, microRNA binding sites, e.g., a detargeting site. Without wishing to be bound by theory, it is believed that an encoded miR binding site can modulate, e.g., prevent, suppress, or otherwise inhibit, the expression of a gene of interest on the viral genome of the invention, based on the expression of the corresponding endogenous microRNA (miRNA) or a corresponding controlled exogenous miRNA in a tissue or cell, e.g., a non-targeting cell or tissue. In some embodiments, a miR binding site modulates, e.g., reduces, expression of the payload encoded by a viral genome of an AAV particle described herein in a cell or tissue where the corresponding mRNA is expressed. In some embodiments, the miR binding site modulates, e.g., reduces, expression of the encoded GBA1 protein in a cell or tissue of the DRG, liver, hematopoietic lineage, or a combination thereof.

[0520] In some embodiments, the viral genome of an AAV particle described herein comprises a nucleotide sequence encoding a microRNA binding site, e.g., a detargeting site. In some embodiments, the viral genome of an AAV particle described herein comprises a nucleotide sequence encoding a miR binding site, a microRNA binding site series (miR BSs), or a reverse complement thereof.

[0521] In some embodiments, the nucleotide sequence encoding the miR binding site series or the miR binding site is located in the 3′-UTR region of the viral genome (e.g., 3′ relative to the nucleic acid sequence encoding a payload), e.g., before the polyA sequence, 5′-UTR region of the viral genome (e.g., 5′ relative to the nucleic acid sequence encoding a payload), or both.

[0522] In some embodiments, the encoded miR binding site series comprise at least 1-5 copies, e.g., 1-3, 2-4, or 3-5 copies, or at least 1, at least 2, at least 3, at least 4, at least 5 or more copies of a miR binding site (miR BS). In some embodiments, the encoded miR binding site series comprises 4 copies of a miR binding site. In some embodiments, all copies are identical, e.g., comprise the same miR binding site. In some embodiments, the miR binding sites within the encoded miR binding site series are continuous and not separated by a spacer. In some embodiments, the miR binding sites within an encoded miR binding site series are separated by a spacer, e.g., a non-coding sequence. In some embodiments, the spacer is about 1 to about 6 nucleotides or about 5 to about 10 nucleotides, e.g., about 7-8 nucleotides, nucleotides in length. In some embodiments, the spacer is about 8 nucleotides in length. In some embodiments, the spacer sequence comprises one or more of (i) GGAT; (ii) CACGTG; (iii) GCATGC, or a repeat of one or more of (i)-(iii). In some embodiments, the spacer comprises the nucleotide sequence of SEQ ID NO: 1848, or a nucleotide sequence having at least one, two, or three modifications, but no more than four modifications of SEQ ID NO: 1848.

[0523] In some embodiments, the encoded miR binding site series comprise at least 1-5 copies, e.g., 1-3, 2-4, or 3-5 copies, or at least 1, at least 2, at least 3, at least 4, at least 5 or more copies of a miR binding site (miR BS). In some embodiments, at least 1, at least 2, at least 3, at least 4, at least 5, or all of the copies are different, e.g., comprise a different miR binding site. In some embodiments, the miR binding sites within the encoded miR binding site series are continuous and not separated by a spacer. In some embodiments, the miR binding sites within an encoded miR binding site series are separated by a spacer, e.g., a non-coding sequence. In some embodiments, the spacer is about 1 to about 6 nucleotides or about 5 to about 10 nucleotides, e.g., about 7-8 nucleotides or about 8 nucleotides, in length. In some embodiments, the spacer sequence comprises one or more of (i) GGAT; (ii) CACGTG; (iii) GCATGC, or a repeat of one or more of (i)-(iii). In some embodiments, the spacer comprises the nucleotide sequence of GATAGTTA (SEQ ID NO: 1848), or a nucleotide sequence having at least one, two, or three modifications, but no more than four modifications of GATAGTTA (SEQ ID NO: 1848).

[0524] In some embodiments, the encoded miR binding site is substantially identical (e.g., at least 70%, 75%, 80%, 85%, 90%, 95%, 99% or 100% identical), to the miR in the host cell. In some embodiments, the encoded miR binding site comprises at least 1, 2, 3, 4, or 5 mismatches or no more than 6, 7, 8, 9, or 10 mismatches to a miR in the host cell. In some embodiments, the mismatched nucleotides are contiguous. In some embodiments, the mismatched nucleotides are non-contiguous. In some embodiments, the mismatched nucleotides occur outside the seed region-binding sequence of the miR binding site, such as at one or both ends of the miR binding site. In some embodiments, the encoded miR binding site is 100% identical to the miR in the host cell.

[0525] In some embodiments, the nucleotide sequence encoding the miR binding site is substantially complementary (e.g., at least 70%, at least 75%, at least 80%, at least 85%, at least 90%, at least 95%, at least 99% or 100% complementary), to the miR in the host cell. In some embodiments, the sequence complementary to the nucleotide sequence encoding the miR binding site comprises at least 1, at least 2, at least 3, at least 4, or at least 5 mismatches or no more than 6, no more than 7, no more than 8, no more than 9, or no more than 10 mismatches relative to the corresponding miR in the host cell. In some embodiments, the mismatched nucleotides are contiguous. In some embodiments, the mismatched nucleotides are non-contiguous. In some embodiments, the mismatched nucleotides occur outside the seed region-binding sequence of the miR binding site, such as at one or both ends of the miR binding site. In some embodiments, the encoded miR binding site is 100% complementary to the miR in the host cell.

[0526] In some embodiments, the encoded miR binding site or the encoded miR binding site series is about 10 to about 125 nucleotides in length, e.g., about 10 to about 50 nucleotides, about 10 to about 100 nucleotides, about 50 to about 100 nucleotides, about 50 to about 125 nucleotides, or about 100 to about 125 nucleotides in length. In some embodiments, an encoded miR binding site or the encoded miR binding site series is about 7 to about 28 nucleotides in length, e.g., about 8-28 nucleotides, about 7-28 nucleotides, about 8-18 nucleotides, about 12-28 nucleotides, about 20-26 nucleotides, about 22 nucleotides, about 24 nucleotides, or about 26 nucleotides in length, and optionally comprises at least one consecutive region (e.g., 7 or 8 nucleotides) complementary (e.g., full complementary or partially complementary) to the seed sequence of a miRNA (e.g., a miR122, a miR142, a miR183).

[0527] In some embodiments, the encoded miR binding site or the encoded miR binding site series is 22 nucleotides in length.

[0528] In some embodiments, the encoded miR binding site is complementary (e.g., fully complementary or partially complementary) to a miR expressed in liver or hepatocytes, such as miR122. In some embodiments, the encoded miR binding site or encoded miR binding site series comprises a miR122 binding site sequence. In some embodiments, the encoded miR122 binding site comprises the nucleotide sequence of ACAAACACCATTGTCACACTCCA (SEQ ID NO: 1865), or a nucleotide sequence having at least 50%, at least 55%, at least 60%, at least 65%, at least 70%, at least 75%, at least 80%, at least 85%, at least 90%, at least at least 95%, at least 99%, or 100% sequence identity, or having at least one, at least two, at least three, at least four, at least five, at least six, or at least seven modifications but no more than ten modifications to SEQ ID NO: 1865, e.g., wherein the modification can result in a mismatch between the encoded miR binding site and the corresponding miRNA. In some embodiments, the viral genome comprises at least 3, 4, or 5 copies of the encoded miR122 binding site, e.g., an encoded miR122 binding site series, optionally wherein the encoded miR122 binding site series comprises the nucleotide sequence of: ACAAACACCATTGTCACACTCCACACAAACACCATTGTCACACTCCACACAAACACCATTGTCA CACTCCA (SEQ ID NO: 1866), or a nucleotide sequence having at least 50%, at least 55%, at least 60%, at least 65%, at least 70%, at least 75%, at least 80%, at least 85%, at least 90%, at least 95%, at least 99%, or 100% sequence identity, or having at least one, two, three, four, five, six, or seven modifications but no more than ten modifications to SEQ ID NO: 1866, e.g., wherein the modification can result in a mismatch between the encoded miR binding site and the corresponding miRNA. In some embodiments, at least two of the encoded miR122 binding sites are connected directly, e.g., without a spacer. In other embodiments, at least two of the encoded miR122 binding sites are separated by a spacer, e.g., 1, 2, 3, 4, 5, 6, 7, 8, 9, or 10 nucleotides in length, which is located between two or more consecutive encoded miR122 binding site sequences. In embodiments, the spacer is about 1 to 6 nucleotides or about 5 to 10 nucleotides, e.g., about 7-8 nucleotides or about 8 nucleotides, in length. In some embodiments, the spacer sequence comprises one or more of (i) GGAT; (ii) CACGTG; (iii) GCATGC, or a repeat of one or more of (i)-(iii). In some embodiments, the spacer comprises the nucleotide sequence of SEQ ID NO: 1848, or a nucleotide sequence having at least one, two, or three modifications, but no more than four modifications of SEQ ID NO: 1848.

[0529] In some embodiments, the encoded miR binding site is complementary (e.g., fully complementary or partially complementary) to a miR expressed in hematopoietic lineage, including immune cells (e.g., antigen presenting cells or APC, including dendritic cells (DCs), macrophages, and B-lymphocytes). In some embodiments, the encoded miR binding site is complementary (e.g., fully complementary or partially complementary) to a miR expressed in hematopoietic lineage comprises a nucleotide sequence disclosed, e.g., in US 2018/0066279, the contents of which are incorporated by reference herein in its entirety.

[0530] In some embodiments, the encoded miR binding site or encoded miR binding site series comprises a miR-142-3p binding site sequence. In some embodiments, the encoded miR-142-3p binding site comprises the nucleotide sequence of TCCATAAAGTAGGAAACACTACA (SEQ ID NO: 1869), a nucleotide sequence having at least 50%, at least 55%, at least 60%, at least 65%, at least 70%, at least 75%, at least 80%, at least 85%, at least 90%, at least 95%, at least 99%, or 100% sequence identity, or having at least one, at least two, at least three, at least four, at least five, at least six, or at least seven modifications but no more than ten modifications to SEQ ID NO: 1842, e.g., wherein the modification can result in a mismatch between the encoded miR binding site and the corresponding miRNA. In some embodiments, the viral genome comprises at least 3, at least 4, or at least 5 copies of an encoded miR-142-3p binding site, e.g., an encoded miR-142-3p binding site series. In some embodiments, the at least 3, at least 4, or at least 5 copies (e.g., 4 copies) of the encoded miR-142-3p binding site are continuous (e.g., not separated by a spacer) or separated by a spacer. In some embodiments, the spacer is about 1 to 6 nucleotides or about 5 to about 10 nucleotides, e.g., about 7-8 nucleotides or about 8 nucleotides, in length. In some embodiments, the spacer sequence comprises one or more of (i) GGAT; (ii) CACGTG; (iii) GCATGC, or a repeat of one or more of (i)-(iii). In some embodiments, the spacer comprises the nucleotide sequence of SEQ ID NO: 1848, or a nucleotide sequence having at least one, two, or three modifications, but no more than four modifications of SEQ ID NO: 1848.

[0531] In some embodiments, the encoded miR binding site is complementary (e.g., fully complementary or partially complementary) to a miR expressed in a DRG (dorsal root ganglion) neuron, e.g., a miR183, a miR182, and/or miR96 binding site. In some embodiments, the encoded miR binding site is complementary (e.g., fully complementary or partially complementary) to a miR expressed in expressed in a DRG neuron. In some embodiments, the encoded miR binding site comprises a nucleotide sequence disclosed, e.g., in WO2020/132455, the contents of which are incorporated by reference herein in its entirety.

[0532] In some embodiments, the encoded miR binding site or encoded miR binding site series comprises a miR183 binding site sequence. In some embodiments, the encoded miR183 binding site comprises the nucleotide sequence of AGTGAATTCTACCAGTGCCATA (SEQ ID NO: 1847), or a nucleotide sequence at least 50%, at least 55%, at least 60%, at least 65%, at least 70%, at least 75%, at least 80%, at least 85%, at least 90%, at least 95%, at least 99%, or 100% sequence identity, or having at least one, at least two, at least three, at least four, at least five, at least six, or at least seven modifications but no more than ten modifications to SEQ ID NO: 1847, e.g., wherein the modification can result in a mismatch between the encoded miR binding site and the corresponding miRNA. In some embodiments, the sequence complementary (e.g., fully complementary or partially complementary) to the seed sequence corresponds to the double underlined of the encoded miR-183 binding site sequence. In some embodiments, the viral genome comprises at least comprises at least 3, at least 4, or at least 5 copies (e.g., 4 copies) of the encoded miR183 binding site, e.g. an encoded miR183 binding site. In some embodiments, the viral genome comprises at least comprises 4 copies of the encoded miR183 binding site. In some embodiments, the viral genome comprises an encoded miR183 binding site comprising 4 copies of a miR183 binding site. In some embodiments, the at least 3, at least 4, or at least 5 copies (e.g., 4 copies) of the encoded miR183 binding site are continuous (e.g., not separated by a spacer) or separated by a spacer. In some embodiments, the spacer is about 1 to about 6 nucleotides or about 5 to about 10 nucleotides, e.g., about 7-8 nucleotides or about 8 nucleotides, in length. In some embodiments, the spacer comprises the nucleotide sequence of SEQ ID NO: 1848, or a nucleotide sequence having at least one, at least two, or at least three modifications, but no more than four modifications of SEQ ID NO: 1848. In some embodiments, the encoded miR183 binding site series comprises the nucleotide sequence of SEQ ID NO: 1849, or a nucleotide sequence having at least 50%, at least 55%, at least 60%, at least 65%, at least 70%, at least 75%, at least 80%, at least 85%, at least 90%, at least 95%, at least 99%, or 100% sequence identity, or having at least one, at least two, at least three, at least four, at least five, at least six, or at least seven modifications but no more than ten modifications to SEQ ID NO: 1849.

[0533] In some embodiments, the encoded miR binding site or encoded miR binding site series comprises a miR182 binding site sequence. In some embodiments, the encoded miR182 binding site comprises, the nucleotide sequence of AGTGTGAGTTCTACCATTGCCAAA (SEQ ID NO: 1867), a nucleotide sequence having at least 50%, at least 55%, at least 60%, at least 65%, at least 70%, at least 75%, at least 80%, at least 85%, at least 90%, at least 95%, at least 99%, or 100% sequence identity, or having at least one, at least two, at least three, at least four, at least five, at least six, or at least seven modifications but no more than ten modifications to SEQ ID NO: 1867, e.g., wherein the modification can result in a mismatch between the encoded miR binding site and the corresponding miRNA. In some embodiments, the viral genome comprises at least 3, at least 4, or at least 5 copies of the encoded miR182 binding site, e.g., an encoded miR182 binding site series. In some embodiments, the at least 3, at least 4, or at least 5 copies (e.g., 4 copies) of the encoded miR182 binding site are continuous (e.g., not separated by a spacer) or separated by a spacer. In some embodiments, the spacer is about 1 to about 6 nucleotides or about 5 to about 10 nucleotides, e.g., about 7-8 nucleotides or about 8 nucleotides, in length. In some embodiments, the spacer comprises the nucleotide sequence of SEQ ID NO: 1848, or a nucleotide sequence having at least one, at least two, or at least three modifications, but no more than four modifications of SEQ ID NO: 1848.

[0534] In some embodiments, the encoded miR binding site or encoded miR binding site series comprises a miR96 binding site sequence. In some embodiments, the encoded miR96 binding site comprises the nucleotide sequence of AGCAAAAATGTGCTAGTGCCAAA (SEQ ID NO: 1868), a sequence having at least 50%, at least 55%, at least 60%, at least 65%, at least 70%, at least 75%, at least 80%, at least 85%, at least 90%, at least 95%, at least 99%, or 100% sequence identity, or having at least one, at least two, at least three, at least four, at least five, at least six, or at least seven modifications but no more than ten modifications to SEQ ID NO: 1868, e.g., wherein the modification can result in a mismatch between the encoded miR binding site and the corresponding miRNA. In some embodiments, the viral genome comprises at least 3, at least 4, or at least 5 copies of the encoded miR96 binding site, e.g., an encoded miR96 binding site series. In some embodiments, the at least 3, at least 4, or at least 5 copies (e.g., 4 copies) of the encoded miR96 binding site are continuous (e.g., not separated by a spacer) or separated by a spacer. In some embodiments, the spacer is about 1 to about 6 nucleotides or about 5 to about 10 nucleotides, e.g., about 7-8 nucleotides or about 8 nucleotides, in length. In some embodiments, the spacer comprises the nucleotide sequence of SEQ ID NO: 1848, or a nucleotide sequence having at least one, at least two, or at least three modifications, but no more than four modifications of SEQ ID NO: 1848.

[0535] In some embodiments, the encoded miR binding site series comprises a miR122 binding site, a miR142 binding site, a miR183 binding site, a miR182 binding site, a miR96 binding site, or a combination thereof. In some embodiments, the encoded miR binding site series comprises at least 3, at least 4, or at least 5 copies of a miR122 binding site, a miR142 binding site, a miR183 binding site, a miR182 binding site, a miR96 binding site, or a combination thereof. In some embodiments, at least two of the encoded miR binding sites are connected directly, e.g., without a spacer. In other embodiments, at least two of the encoded miR binding sites are separated by a spacer, e.g., 1, 2, 3, 4, 5, 6, 7, 8, 9, or 10 nucleotides in length, which is located between two or more consecutive encoded miR binding site sequences. In embodiments, the spacer is at least about 5 to about 10 nucleotides, e.g., about 7-8 nucleotides or about 8 nucleotides, in length. In some embodiments, the spacer sequence comprises one or more of (i) GGAT; (ii) CACGTG; (iii) GCATGC, or a repeat of one or more of (i)-(iii). In some embodiments, the spacer comprises the nucleotide sequence of SEQ ID NO: 1848, or a nucleotide sequence having at least one, two, or three modifications, but no more than four modifications of SEQ ID NO: 1848.

[0536] In some embodiments, an encoded miR binding site series comprises at least 3-5 copies (e.g., 4 copies) of a combination of at least two, three, four, five, or all of a miR122 binding site, a miR142 binding site, a miR183 binding site, a miR182 binding site, a miR96 binding site, wherein each of the miR binding sites within the series are continuous (e.g., not separated by a spacer) or separated by a spacer. In some embodiments, the spacer is about 1 to about 6 nucleotides or about 5 to about 10 nucleotides, e.g., about 7-8 nucleotides or about 8 nucleotides, in length. In some embodiments, the spacer sequence comprises one or more of (i) GGAT; (ii) CACGTG; (iii) GCATGC, or a repeat of one or more of (i)-(iii). In some embodiments, the spacer comprises the nucleotide sequence of SEQ ID NO: 1848, or a nucleotide sequence having at least one, two, or three modifications, but no more than four modifications of SEQ ID NO: 1848.

### Viral Genome Component: Polyadenylation Sequence

[0537] In some embodiments, the viral genome of the AAV particles of the present disclosure comprises at least one polyadenylation (polyA) sequence. The viral genome of the AAV particle may comprise a polyadenylation sequence between the 3′ end of the payload coding sequence and the 5′ end of the 3′UTR. In some embodiments, the polyA signal region is positioned 3′ relative to the nucleic acid comprising the transgene encoding the payload, e.g., a GBA1 protein described herein.

[0538] In some embodiments, the polyA signal region comprises a length of about 100-600 nucleotides, e.g., about 100-500 nucleotides, about 100-400 nucleotides, about 100-300 nucleotides, about 100-200 nucleotides, about 200-600 nucleotides, about 200-500 nucleotides, about 200-400 nucleotides, about 200-300 nucleotides, about 300-600 nucleotides, about 300-500 nucleotides, about 300-400 nucleotides, about 400-600 nucleotides, about 400-500 nucleotides, or about 500-600 nucleotides. In some embodiments, the poly A signal region comprises a length of about 100 to about 150 nucleotides, e.g., about 127 nucleotides. In some embodiments, the polyA signal region comprises a length of about 450 to about 500 nucleotides, e.g., about 477 nucleotides. In some embodiments, the polyA signal region comprises a length of about 520 to about 560 nucleotides, e.g., about 552 nucleotides. In some embodiments, the polyA signal region comprises a length of about 127 nucleotides.

[0539] In some embodiments, the viral genome comprises a human growth hormone (hGH) polyA sequence. In some embodiments, the viral genome comprises an hGH polyA as described above and a payload region encoding the GCase protein, or the GCase and an enhancement element (e.g., a prosaposin, SapA, or SapC protein, or variant thereof; a cell penetrating peptide (e.g., an ApoEII peptide, a TAT peptide, or an ApoB peptide); or a lysosomal targeting peptide) e.g., encoding a sequence as provided in Tables 3 and 4 or fragment or variant thereof.

### Viral Genome Component: Filler Sequence

[0540] In some embodiments, the viral genome comprises one or more filler sequences. The filler sequence may be a wild-type sequence or an engineered sequence. A filler sequence may be a variant of a wild-type sequence. In some embodiments, a filler sequence is a derivative of human albumin.

[0541] In some embodiments, the viral genome comprises one or more filler sequences in order to have the length of the viral genome be the optimal size for packaging. In some embodiments, the viral genome comprises at least one filler sequence in order to have the length of the viral genome be about 2.3 kb. In some embodiments, the viral genome comprises at least one filler sequence in order to have the length of the viral genome be about 4.6 kb.

[0542] In some embodiments, the viral genome is a single stranded (ss) viral genome and comprises one or more filler sequences that, independently or together, have a length about between 0.1 kb-3.8 kb, such as, but not limited to, 0.1 kb, 0.2 kb, 0.3 kb, 0.4 kb, 0.5 kb, 0.6 kb, 0.7 kb, 0.8 kb, 0.9 kb, 1 kb, 1.1 kb, 1.2 kb, 1.3 kb, 1.4 kb, 1.5 kb, 1.6 kb, 1.7 kb, 1.8 kb, 1.9 kb, 2 kb, 2.1 kb, 2.2 kb, 2.3 kb, 2.4 kb, 2.5 kb, 2.6 kb, 2.7 kb, 2.8 kb, 2.9 kb, 3 kb, 3.1 kb, 3.2 kb, 3.3 kb, 3.4 kb, 3.5 kb, 3.6 kb, 3.7 kb, or 3.8 kb. In some embodiments, the total length filler sequence in the vector genome is 3.1 kb. In some embodiments, the total length filler sequence in the vector genome is 2.7 kb. In some embodiments, the total length filler sequence in the vector genome is 0.8 kb. In some embodiments, the total length filler sequence in the vector genome is 0.4 kb. In some embodiments, the length of each filler sequence in the vector genome is 0.8 kb. In some embodiments, the length of each filler sequence in the vector genome is 0.4 kb.

[0543] In some embodiments, the viral genome is a self-complementary (sc) viral genome and comprises one or more filler sequences that, independently or together, have a length about between 0.1 kb-1.5 kb, such as, but not limited to, 0.1 kb, 0.2 kb, 0.3 kb, 0.4 kb, 0.5 kb, 0.6 kb, 0.7 kb, 0.8 kb, 0.9 kb, 1 kb, 1.1 kb, 1.2 kb, 1.3 kb, 1.4 kb, or 1.5 kb. In some embodiments, the total length filler sequence in the vector genome is 0.8 kb. In some embodiments, the total length filler sequence in the vector genome is 0.4 kb. In some embodiments, the length of each filler sequence in the vector genome is 0.8 kb. In some embodiments, the length of each filler sequence in the vector genome is 0.4 kb.

[0544] In some embodiments, the viral genome comprises any portion of a filler sequence. The viral genome may comprise 1%, 2%, 3%, 4%, 5%, 6%, 7%, 8%, 9%, 10%, 15%, 20%, 25%, 30%, 35%, 40%, 45%, 50%, 55%, 60%, 65%, 70%, 75%, 80%, 85%, 90%, 95%, or 99% of a filler sequence.

[0545] In some embodiments, the viral genome is a single stranded (ss) viral genome and comprises one or more filler sequences in order to have the length of the viral genome be about 4.6 kb. In some embodiments, the viral genome comprises at least one filler sequence and the filler sequence is located 3′ to the 5′ ITR sequence. In some embodiments, the viral genome comprises at least one filler sequence and the filler sequence is located 5′ to a promoter sequence. In some embodiments, the viral genome comprises at least one filler sequence and the filler sequence is located 3′ to the polyadenylation signal sequence. In some embodiments, the viral genome comprises at least one filler sequence and the filler sequence is located 5′ to the 3′ ITR sequence. In some embodiments, the viral genome comprises at least one filler sequence, and the filler sequence is located between two intron sequences. In some embodiments, the viral genome comprises at least one filler sequence, and the filler sequence is located within an intron sequence. In some embodiments, the viral genome comprises two filler sequences, and the first filler sequence is located 3′ to the 5′ ITR sequence and the second filler sequence is located 3′ to the polyadenylation signal sequence. In some embodiments, the viral genome comprises two filler sequences, and the first filler sequence is located 5′ to a promoter sequence and the second filler sequence is located 3′ to the polyadenylation signal sequence. In some embodiments, the viral genome comprises two filler sequences, and the first filler sequence is located 3′ to the 5′ ITR sequence and the second filler sequence is located 5′ to the 5′ ITR sequence.

[0546] In some embodiments, the viral genome is a self-complementary (sc) viral genome and comprises one or more filler sequences in order to have the length of the viral genome be about 2.3 kb. In some embodiments, the viral genome comprises at least one filler sequence and the filler sequence is located 3′ to the 5′ ITR sequence. In some embodiments, the viral genome comprises at least one filler sequence and the filler sequence is located 5′ to a promoter sequence. In some embodiments, the viral genome comprises at least one filler sequence and the filler sequence is located 3′ to the polyadenylation signal sequence. In some embodiments, the viral genome comprises at least one filler sequence and the filler sequence is located 5′ to the 3′ ITR sequence. In some embodiments, the viral genome comprises at least one filler sequence, and the filler sequence is located between two intron sequences. As a non-limiting example, the viral genome comprises at least one filler sequence, and the filler sequence is located within an intron sequence. In some embodiments, the viral genome comprises two filler sequences, and the first filler sequence is located 3′ to the 5′ ITR sequence and the second filler sequence is located 3′ to the polyadenylation signal sequence. In some embodiments, the viral genome comprises two filler sequences, and the first filler sequence is located 5′ to a promoter sequence and the second filler sequence is located 3′ to the polyadenylation signal sequence. In some embodiments, the viral genome comprises two filler sequences, and the first filler sequence is located 3′ to the 5′ ITR sequence and the second filler sequence is located 5′ to the 5′ ITR sequence.

[0547] In some embodiments, the viral genome may comprise one or more filler sequences between one of more regions of the viral genome. In some embodiments, the filler region may be located before a region such as, but not limited to, a payload region, an inverted terminal repeat (ITR), a promoter region, an intron region, an enhancer region, a polyadenylation signal sequence region, and/or an exon region. In some embodiments, the filler region may be located after a region such as, but not limited to, a payload region, an inverted terminal repeat (ITR), a promoter region, an intron region, an enhancer region, a polyadenylation signal sequence region, and/or an exon region. In some embodiments, the filler region may be located before and after a region such as, but not limited to, a payload region, an inverted terminal repeat (ITR), a promoter region, an intron region, an enhancer region, a polyadenylation signal sequence region, and/or an exon region.

[0548] In some embodiments, the viral genome may comprise one or more filler sequences that bifurcate(s) at least one region of the viral genome. The bifurcated region of the viral genome may comprise 1%, 2%, 3%, 4%, 5%, 6%, 7%, 8%, 9%, 10%, 15%, 20%, 25%, 30%, 35%, 40%, 45%, 50%, 55%, 60%, 65%, 70%, 75%, 80%, 85%, 90%, 95%, or 99% of the of the region to the 5′ of the filler sequence region. In some embodiments, the filler sequence may bifurcate at least one region so that 10% of the region is located 5′ to the filler sequence and 90% of the region is located 3′ to the filler sequence. In some embodiments, the filler sequence may bifurcate at least one region so that 20% of the region is located 5′ to the filler sequence and 80% of the region is located 3′ to the filler sequence. In some embodiments, the filler sequence may bifurcate at least one region so that 30% of the region is located 5′ to the filler sequence and 70% of the region is located 3′ to the filler sequence. In some embodiments, the filler sequence may bifurcate at least one region so that 40% of the region is located 5′ to the filler sequence and 60% of the region is located 3′ to the filler sequence. In some embodiments, the filler sequence may bifurcate at least one region so that 50% of the region is located 5′ to the filler sequence and 50% of the region is located 3′ to the filler sequence. In some embodiments, the filler sequence may bifurcate at least one region so that 60% of the region is located 5′ to the filler sequence and 40% of the region is located 3′ to the filler sequence. In some embodiments, the filler sequence may bifurcate at least one region so that 70% of the region is located 5′ to the filler sequence and 30% of the region is located 3′ to the filler sequence. In some embodiments, the filler sequence may bifurcate at least one region so that 80% of the region is located 5′ to the filler sequence and 20% of the region is located 3′ to the filler sequence. In some embodiments, the filler sequence may bifurcate at least one region so that 90% of the region is located 5′ to the filler sequence and 10% of the region is located 3′ to the filler sequence.

[0549] In some embodiments, the viral genome comprises a filler sequence after the 5′ ITR.

[0550] In some embodiments, the viral genome comprises a filler sequence after the promoter region. In some embodiments, the viral genome comprises a filler sequence after the payload region. In some embodiments, the viral genome comprises a filler sequence after the intron region. In some embodiments, the viral genome comprises a filler sequence after the enhancer region. In some embodiments, the viral genome comprises a filler sequence after the polyadenylation signal sequence region. In some embodiments, the viral genome comprises a filler sequence after the exon region.

[0551] In some embodiments, the viral genome comprises a filler sequence before the promoter region. In some embodiments, the viral genome comprises a filler sequence before the payload region. In some embodiments, the viral genome comprises a filler sequence before the intron region. In some embodiments, the viral genome comprises a filler sequence before the enhancer region. In some embodiments, the viral genome comprises a filler sequence before the polyadenylation signal sequence region. In some embodiments, the viral genome comprises a filler sequence before the exon region.

[0552] In some embodiments, the viral genome comprises a filler sequence before the 3′ ITR.

[0553] In some embodiments, a filler sequence may be located between two regions, such as, but not limited to, the 5′ ITR and the promoter region. In some embodiments, a filler sequence may be located between two regions, such as, but not limited to, the 5′ ITR and the payload region. In some embodiments, a filler sequence may be located between two regions, such as, but not limited to, the 5′ ITR and the intron region. In some embodiments, a filler sequence may be located between two regions, such as, but not limited to, the 5′ ITR and the enhancer region. In some embodiments, a filler sequence may be located between two regions, such as, but not limited to, the 5′ ITR and the polyadenylation signal sequence region.

[0554] In some embodiments, a filler sequence may be located between two regions, such as, but not limited to, the 5′ ITR and the exon region.

[0555] In some embodiments, a filler sequence may be located between two regions, such as, but not limited to, the promoter region and the payload region. In some embodiments, a filler sequence may be located between two regions, such as, but not limited to, the promoter region and the intron region. In some embodiments, a filler sequence may be located between two regions, such as, but not limited to, the promoter region and the enhancer region. In some embodiments, a filler sequence may be located between two regions, such as, but not limited to, the promoter region and the polyadenylation signal sequence region. In some embodiments, a filler sequence may be located between two regions, such as, but not limited to, the promoter region and the exon region. In some embodiments, a filler sequence may be located between two regions, such as, but not limited to, the promoter region and the 3′ ITR.

[0556] In some embodiments, a filler sequence may be located between two regions, such as, but not limited to, the payload region and the intron region. In some embodiments, a filler sequence may be located between two regions, such as, but not limited to, the payload region and the enhancer region. In some embodiments, a filler sequence may be located between two regions, such as, but not limited to, the payload region and the polyadenylation signal sequence region. In some embodiments, a filler sequence may be located between two regions, such as, but not limited to, the payload region and the exon region.

[0557] In some embodiments, a filler sequence may be located between two regions, such as, but not limited to, the payload region and the 3′ ITR.

### Viral Genome Component: Payloads

[0558] In some embodiments, the disclosure provides an AAV particle comprising a viral genome encoding a GBA1 protein, e.g., a GCase protein, encoded by the nucleotide sequences of SEQ ID NO: 2001 or SEQ ID NO: 2002. In some embodiments, the viral genome comprises a promoter operably linked to a nucleotide sequence encoding a GBA1 protein, e.g., SEQ ID NO: 2001 or SEQ ID NO: 2002. In some embodiments, the viral genome comprises the nucleotide sequence of SEQ ID NO: 2002.

[0559] In some embodiments, the disclosure herein provides constructs that allow for improved expression of GCase protein delivered by gene therapy vectors.

[0560] In some embodiments, the disclosure provides constructs that allow for improved biodistribution of GCase protein delivered by gene therapy vectors.

[0561] In some embodiments, the disclosure provides constructs that allow for improved sub-cellular distribution or trafficking of GCase protein delivered by gene therapy vectors.

[0562] In some embodiments, the disclosure provides constructs that allow for improved trafficking of GCase protein to lysosomal membranes delivered by gene therapy vectors.

[0563] In some embodiments, the present disclosure relates to a composition containing or comprising a nucleic acid sequence encoding a GBA1 protein or a functional fragment or variant thereof and methods of administering the composition in vitro or in vivo in a subject, e.g., a human subject and/or an animal model of disease, e.g., a disease related to expression of GBA.

[0564] AAV particles of the present disclosure may comprise a nucleic acid sequence encoding at least one “payload.” As used herein, “payload” or “payload region” refers to one or more polynucleotides or polynucleotide regions encoded by or within a viral genome or an expression product of such polynucleotide or polynucleotide region, e.g., a transgene, a polynucleotide encoding a polypeptide or multi-polypeptide, e.g., a GBA1 protein or a functional fragment or variant thereof. The payload may comprise any nucleic acid known in the art that is useful for the expression (by supplementation of the protein product or gene replacement using a modulatory nucleic acid) of a GBA1 protein in a target cell transduced or contacted with the AAV particle carrying the payload.

[0565] In some embodiments, the disclosure provides a nucleotide sequence encoding a GBA1 protein for use in an AAV genome, wherein the nucleotide sequence comprises a codon-optimized, CpG-reduced (e.g., CpG-depleted) GBA1-encoding sequence. In some embodiments, the CpG-reduced (e.g., CpG-depleted) GBA1-encoding sequence provides improved toxicity in vivo, e.g., reduced immunogenicity in a human or animal subject. In some embodiments, the nucleotide sequence further comprises one or more, e.g., all of, a 5′ ITR sequence, a CMVie sequence, a CB promoter sequence, an intron sequence, a signal sequence, a polyA sequence, and a 3′ ITR sequence. In some embodiments, the GBA1 protein encoded by the nucleotide sequence has an amino acid sequence that is 100% identical to a wildtype GBA1 protein. In some embodiments, the wildtype GBA1-encoding sequence is as provided by NCBI Reference Sequence NCBI Reference Sequence NP_000148.2 (SEQ ID NO: 14 of Int'l Pub. No. WO2019070893, incorporated by reference herein).

[0566] In some embodiments, the AAV genome encodes a payload construct that comprises a combination of coding and non-coding nucleic acid sequences.

[0567] In some embodiments, the viral genome encodes more than one payload. As a non-limiting example, a viral genome encoding more than one payload may be replicated and packaged into a viral particle. A target cell transduced with a viral particle comprising more than one payload may express each of the payloads in a single cell.

[0568] In some embodiments, the viral genome may encode a coding or non-coding RNA. In certain embodiments, the adeno-associated viral vector particle further comprises at least one cis-element selected from the group consisting of a Kozak sequence, a backbone sequence, and an intron sequence.

[0569] In some embodiments, the payload is a polypeptide comprising a secreted protein, an intracellular protein, an extracellular protein, and/or a membrane protein. In some embodiments, the encoded proteins may be structural or functional. In some embodiments, the proteins encoded by the viral genome include, but are not limited to, mammalian proteins. In certain embodiments, the AAV particle comprises a viral genome that encodes GBA1 protein or a functional fragment or variant thereof. The AAV particles described herein may be useful in the fields of human disease, veterinary applications, and a variety of in vivo and in vitro settings.

[0570] In some embodiments, a payload comprises a polypeptide that serve as a marker protein to assess cell transformation and expression, a fusion having a desired biological activity, a gene product that can complement a genetic defect, an RNA molecule, a transcription factor, and/or another gene products related to gene regulation and/or expression.

[0571] In some embodiments, the payload comprises a gene therapy product including, but not limited to, a polypeptide, RNA molecule, or other gene product that, when expressed in a target cell, provides a desired therapeutic effect. In some embodiments, a gene therapy product may comprise a substitute for a non-functional gene or a gene that is absent, expressed in insufficient amounts, or mutated. In some embodiments, a gene therapy product may comprise a substitute for a non-functional protein or polypeptide or a protein or polypeptide that is absent, expressed in insufficient amounts, misfolded, degraded too rapidly, or mutated. For example, a gene therapy product may comprise a polynucleotide encoding a GBA1 protein to treat GCase deficiency or GBA1-related disorders. In some embodiments, the gene therapy product comprises a polynucleotide sequence encoding a GBA1 protein.

[0572] In some embodiments, the payload encodes a messenger RNA (mRNA). As used herein, the term “messenger RNA” (mRNA) refers to any polynucleotide that encodes a polypeptide of interest and that is capable of being translated to produce the encoded polypeptide of interest in vitro, in vivo, in situ, or ex vivo. Certain embodiments provide the mRNA as encoding GCase or a variant thereof.

[0573] In some embodiments, the protein or polypeptide encoded by the payload construct encoding GCase or a functional variant thereof is between about 50 and about 4500 amino acid residues in length (hereinafter in this context, “X amino acids in length” refers to X amino acid residues). In some embodiments, the protein or polypeptide encoded is between 50-2000 amino acids in length. In some embodiments, the protein or polypeptide encoded is 50-1000 amino acids in length. In some embodiments, the protein or polypeptide encoded is 50-1500 amino acids in length. In some embodiments, the protein or polypeptide encoded is 50-1000 amino acids in length. In some embodiments, the protein or polypeptide encoded is 50-800 amino acids in length. In some embodiments, the protein or polypeptide encoded is 50-600 amino acids in length. In some embodiments, the protein or polypeptide encoded is 50-400 amino acids in length. In some embodiments, the protein or polypeptide encoded is 50-200 amino acids in length. In some embodiments, the protein or polypeptide encoded is 50-100 amino acids in length. In some embodiments, the protein or polypeptide encoded is 497 amino acids in length.

[0574] A payload construct encoding a payload may comprise or encode a selectable marker. A selectable marker may comprise a gene sequence or a protein or polypeptide encoded by a gene sequence expressed in a host cell that allows for the identification, selection, and/or purification of the host cell from a population of cells that may or may not express the selectable marker. In some embodiments, the selectable marker provides resistance to survive a selection process that would otherwise kill the host cell, such as treatment with an antibiotic. In some embodiments, an antibiotic selectable marker may comprise one or more antibiotic resistance factors, including but not limited to neomycin resistance (e.g., neo), hygromycin resistance, kanamycin resistance, and/or puromycin resistance.

[0575] In some embodiments, a payload construct encoding a payload may comprise a selectable marker including, but not limited to, β-lactamase, luciferase, β-galactosidase, or any other reporter gene as that term is understood in the art, including cell-surface markers, such as CD4 or the truncated nerve growth factor (NGFR) (for GFP, see WO 96/23810; Heim et al., Current Biology 2:178-182 (1996); Heim et al., Proc. Natl. Acad. Sci. USA (1995); or Heim et al., Science 373:663-664 (1995); for β-lactamase, see WO 96/30540); the contents of each of which are herein incorporated by reference in their entirety.

[0576] In some embodiments, a payload construct encoding a selectable marker may comprise a fluorescent protein. A fluorescent protein as herein described may comprise any fluorescent marker including but not limited to green, yellow, and/or red fluorescent protein (GFP, YFP, and/or RFP). In some embodiments, a payload construct encoding a selectable marker may comprise a human influenza hemagglutinin (HA) tag.

[0577] In certain embodiments, a nucleic acid for expression of a payload in a target cell will be incorporated into the viral genome and located between two ITR sequences.

[0578] In some embodiments, a payload construct further comprises a nucleic acid sequence encoding a peptide that binds to the cation-independent mannose 6-phosphate (M6P) receptor (CI-MPR) with high affinity, as described in Int'l Pat. App. Pub. No. WO2019213180A1, the disclosure of which is incorporated herein by reference in its entirety. The peptide that binds CI-MPR can be, e.g., an IGF2 peptide or variant thereof. Binding of CI-MPR can facilitate cellular uptake or delivery and intracellular or sub-cellular targeting of therapeutic proteins provided by gene therapy vectors.

### Payload Component: Signal Sequence

[0579] In some embodiments, the nucleic acid sequence comprising the transgene encoding the payload, e.g., a GBA1 protein, comprises a nucleic acid sequence encoding a signal sequence (e.g., a signal sequence region herein).

[0580] In some embodiments, the nucleotide sequence encoding the signal sequence is located 5′ relative to the nucleotide sequence encoding the GBA1 protein. In some embodiments, the encoded GBA1 protein comprises a signal sequence at the N-terminus, wherein the signal sequence is optionally cleaved during cellular processing and/or localization of the GBA1 protein and/or the enhancement element.

[0581] In some embodiments, the signal sequence comprises SEQ ID NO: 2005 or a sequence that is at least 85% identical (e.g., at least 85%, at least 90%, at least 91%, at least 92%, at least 93%, at least 94%, at least 95%, at least 96%, at least 97%, at least 98%, or at least 99% identical) thereto. In some embodiments, the signal sequence comprises the amino acid sequence of SEQ ID NO: 1853 or an amino acid sequence at least at least 90% identical (e.g., at least 90%, at least 91%, at least 92%, at least 93%, at least 94%, at least 95%, at least 96%, at least 97%, at least 98%, or at least 99% identical) thereto.

### Exemplary GCase (GBA1) Protein Payload

[0582] In some embodiments, the payload, e.g., of a viral genome described herein, is a wildtype GBA1 protein, e.g., a wild-type GBA1 protein.

[0583] Tables 2A and 2B provide exemplary polynucleotide sequences encoding a GBA1 protein and polypeptide sequences of exemplary GBA1 proteins that may be used in the viral genomes disclosed herein and which may constitute a GBA1 protein payload. In some embodiments, the GBA1 protein suitable for delivery in an AAV disclosed herein is encoded by the nucleotide sequence of SEQ ID NO: 2001 or SEQ ID NO: 2002.

TABLE 2A
Exemplary GCase Sequences

| SEQ | | | |
|---|---|---|---|
| ID NO: | Type | Species | Description |
| 1740 | Protein | Homo sapiens | GBA1 protein NP_000148.2 |
| 1741 | DNA | Homo sapiens | GBA1 mRNA transcript variant 1 |
| | | | NM_000157.4 |
| 1742 | Protein | Homo sapiens | GBA1 protein NP_001005741.1 |
| 1743 | DNA | Homo sapiens | GBA1 mRNA transcript variant 2 |
| | | | NM_01005741.3 |
| 1744 | Protein | Homo sapiens | GBA1 protein NP_001005742.1 |
| 1745 | DNA | Homo sapiens | GBA1 mRNA transcript variant 3 |
| | | | NM_001005742.3 |
| 1746 | Protein | Homo sapiens | GBA1 protein NP_001165282.1 |
| 1747 | DNA | Homo sapiens | GBA1 mRNA transcript variant 4 |
| | | | NM_001171811.2 |
| 1748 | Protein | Homo sapiens | GBA1 protein NP_001165283.1 |
| 1749 | DNA | Homo sapiens | GBA1 mRNA transcript variant 5 |
| | | | NM_001171812.2 |

TABLE 2B
Exemplary GCase Sequences

| | | SEQ |
|---|---|---|
| Description | Sequence | ID NO: |
| GBA1 Variant 1 | ATGGAATTCTCTAGCCCATCTAGAGAGGAATGTCCTAAGCCTCTGTCAA | 1772 |
| (signal sequence | GAGTGTCCATCATGGCCGGCAGCCTGACAGGCCTGCTGCTGCTGCAGGC | |
| underlined)-nt | CGTGTCCTGGGCCAGTGGAGCCCGGCCCTGCATCCCTAAGTCCTTCGGC | |
| | TATTCTAGCGTGGTCTGCGTGTGTAATGCCACTTACTGCGACAGCTTCG | |
| | ACCCTCCTACCTTCCCCGCCCTTGGAACATTCAGCAGATACGAGAGCAC | |
| | CAGAAGCGGCAGAAGAATGGAACTGAGCATGGGCCCAATCCAGGCCAAC | |
| | CACACCGGCACCGGCCTGCTGCTGACACTGCAACCTGAGCAGAAGTTCC | |
| | AGAAGGTGAAGGGATTTGGAGGCGCCATGACCGACGCTGCTGCTCTGAA | |
| | CATCCTGGCCCTCTCCCCACCTGCTCAGAACCTGCTGCTTAAAAGCTAC | |
| | TTCAGCGAGGAAGGCATCGGCTATAACATCATCAGAGTGCCCATGGCCA | |
| | GCTGCGACTTCAGCATCAGAACATACACCTACGCCGATACACCTGATGA | |
| | CTTCCAACTGCACAACTTCAGCCTGCCTGAAGAGGACACAAAGCTGAAA | |
| | ATCCCCCTGATCCACCGGGCCCTGCAGCTGGCCCAGAGACCTGTGAGCC | |
| | TGCTGGCCTCTCCTTGGACAAGCCCCACCTGGCTGAAGACCAATGGAGC | |
| | TGTGAACGGCAAGGGCAGCCTGAAGGGCCAGCCCGGCGACATCTACCAC | |
| | CAAACCTGGGCTCGCTACTTCGTGAAATTCCTGGACGCCTACGCTGAGC | |
| | ATAAGCTGCAATTTTGGGCCGTTACAGCCGAGAACGAGCCTTCTGCCGG | |
| | CCTGCTGTCTGGATATCCTTTCCAGTGCCTGGGCTTCACCCCTGAGCAC | |
| | CAGAGAGACTTTATCGCCAGAGATCTGGGGCCTACCCTGGCTAACAGCA | |
| | CACACCACAACGTGCGGCTGCTGATGCTGGACGATCAGAGGCTGCTGCT | |
| | CCCCCACTGGGCCAAGGTGGTGCTGACAGATCCGGAGGCCGCCAAATAC | |
| | GTGCACGGCATCGCCGTCCACTGGTACCTGGATTTCCTGGCCCCTGCCA | |
| | AGGCCACCCTGGGCGAGACACATAGACTGTTTCCTAATACCATGCTGTT | |
| | CGCCAGCGAGGCCTGCGTGGGCAGCAAGTTCTGGGAACAGAGCGTGCGG | |
| | CTGGGCAGCTGGGACAGAGGAATGCAGTACAGCCACAGCATCATTACCA | |
| | ACCTGCTGTACCACGTGGTGGGCTGGACCGACTGGAACCTGGCCCTGAA | |
| | CCCCGAAGGCGGCCCCAACTGGGTGCGGAACTTCGTGGACTCTCCTATC | |
| | ATCGTGGATATTACCAAGGATACCTTTTACAAGCAGCCTATGTTCTACC | |
| | ACCTGGGCCACTTCAGCAAGTTCATCCCTGAGGGCTCTCAGCGGGTGGG | |
| | CCTGGTGGCCTCTCAGAAAAACGACCTGGATGCCGTTGCCCTGATGCAC | |
| | CCCGACGGCAGCGCCGTGGTGGTCGTCCTGAATAGAAGCTCCAAGGACG | |
| | TGCCTCTGACCATCAAGGACCCCGCTGTGGGATTTCTGGAAACCATCAG | |
| | CCCTGGCTACAGCATCCACACCTACCTGTGGCGGCGGCAG | |
| GBA1 Variant 1 | GCCCGGCCCTGCATCCCTAAGTCCTTCGGCTATTCTAGCGTGGTCTGCG | 1773 |
| (no signal | TGTGTAATGCCACTTACTGCGACAGCTTCGACCCTCCTACCTTCCCCGC | |
| sequence)-nt | CCTTGGAACATTCAGCAGATACGAGAGCACCAGAAGCGGCAGAAGAATG | |
| | GAACTGAGCATGGGCCCAATCCAGGCCAACCACACCGGCACCGGCCTGC | |
| | TGCTGACACTGCAACCTGAGCAGAAGTTCCAGAAGGTGAAGGGATTTGG | |
| | AGGCGCCATGACCGACGCTGCTGCTCTGAACATCCTGGCCCTCTCCCCA | |
| | CCTGCTCAGAACCTGCTGCTTAAAAGCTACTTCAGCGAGGAAGGCATCG | |
| | GCTATAACATCATCAGAGTGCCCATGGCCAGCTGCGACTTCAGCATCAG | |
| | AACATACACCTACGCCGATACACCTGATGACTTCCAACTGCACAACTTC | |
| | AGCCTGCCTGAAGAGGACACAAAGCTGAAAATCCCCCTGATCCACCGGG | |
| | CCCTGCAGCTGGCCCAGAGACCTGTGAGCCTGCTGGCCTCTCCTTGGAC | |
| | AAGCCCCACCTGGCTGAAGACCAATGGAGCTGTGAACGGCAAGGGCAGC | |
| | CTGAAGGGCCAGCCCGGCGACATCTACCACCAAACCTGGGCTCGCTACT | |
| | TCGTGAAATTCCTGGACGCCTACGCTGAGCATAAGCTGCAATTTTGGGC | |
| | CGTTACAGCCGAGAACGAGCCTTCTGCCGGCCTGCTGTCTGGATATCCT | |
| | TTCCAGTGCCTGGGCTTCACCCCTGAGCACCAGAGAGACTTTATCGCCA | |
| | GAGATCTGGGGCCTACCCTGGCTAACAGCACACACCACAACGTGCGGCT | |
| | GCTGATGCTGGACGATCAGAGGCTGCTGCTCCCCCACTGGGCCAAGGTG | |
| | GTGCTGACAGATCCGGAGGCCGCCAAATACGTGCACGGCATCGCCGTCC | |
| | ACTGGTACCTGGATTTCCTGGCCCCTGCCAAGGCCACCCTGGGCGAGAC | |
| | ACATAGACTGTTTCCTAATACCATGCTGTTCGCCAGCGAGGCCTGCGTG | |
| | GGCAGCAAGTTCTGGGAACAGAGCGTGCGGCTGGGCAGCTGGGACAGAG | |
| | GAATGCAGTACAGCCACAGCATCATTACCAACCTGCTGTACCACGTGGT | |
| | GGGCTGGACCGACTGGAACCTGGCCCTGAACCCCGAAGGCGGCCCCAAC | |
| | TGGGTGCGGAACTTCGTGGACTCTCCTATCATCGTGGATATTACCAAGG | |
| | ATACCTTTTACAAGCAGCCTATGTTCTACCACCTGGGCCACTTCAGCAA | |
| | GTTCATCCCTGAGGGCTCTCAGCGGGTGGGCCTGGTGGCCTCTCAGAAA | |
| | AACGACCTGGATGCCGTTGCCCTGATGCACCCCGACGGCAGCGCCGTGG | |
| | TGGTCGTCCTGAATAGAAGCTCCAAGGACGTGCCTCTGACCATCAAGGA | |
| | CCCCGCTGTGGGATTTCTGGAAACCATCAGCCCTGGCTACAGCATCCAC | |
| | ACCTACCTGTGGCGGCGGCAG | |
| GBA1 Variant 1 | MEFSSPSREECPKPLSRVSIMAGSLTGLLLLQAVSWASGARPCIPKSFG | 1774 |
| (signal sequence | YSSVVCVCNATYCDSFDPPTFPALGTFSRYESTRSGRRMELSMGPIQAN | |
| underlined)-aa | HTGTGLLLTLQPEQKFQKVKGFGGAMTDAAALNILALSPPAQNLLLKSY | |
| | FSEEGIGYNIIRVPMASCDFSIRTYTYADTPDDFQLHNFSLPEEDTKLK | |
| | IPLIHRALQLAQRPVSLLASPWTSPTWLKINGAVNGKGSLKGQPGDIYH | |
| | QTWARYFVKFLDAYAEHKLQFWAVTAENEPSAGLLSGYPFQCLGFTPEH | |
| | QRDFIARDLGPTLANSTHHNVRLLMLDDQRLLLPHWAKVVLTDPEAAKY | |
| | VHGIAVHWYLDFLAPAKATLGETHRLFPNTMLFASEACVGSKFWEQSVR | |
| | LGSWDRGMQYSHSIITNLLYHVVGWTDWNLALNPEGGPNWVRNFVDSPI | |
| | IVDITKDTFYKQPMFYHLGHFSKFIPEGSQRVGLVASQKNDLDAVALMH | |
| | PDGSAVVVVLNRSSKDVPLTIKDPAVGFLETISPGYSIHTYLWRRQ | |
| GBA1 Variant 1 | ARPCIPKSFGYSSVVCVCNATYCDSFDPPTFPALGTFSRYESTRSGRRM | 1775 |
| (no signal | ELSMGPIQANHTGTGLLLTLQPEQKFQKVKGFGGAMTDAAALNILALSP | |
| sequence)-aa | PAQNLLLKSYFSEEGIGYNIIRVPMASCDFSIRTYTYADTPDDFQLHNF | |
| | SLPEEDTKLKIPLIHRALQLAQRPVSLLASPWTSPTWLKTNGAVNGKGS | |
| | LKGQPGDIYHQTWARYFVKFLDAYAEHKLQFWAVTAENEPSAGLLSGYP | |
| | FQCLGFTPEHQRDFIARDLGPTLANSTHHNVRLLMLDDQRLLLPHWAKV | |
| | VLTDPEAAKYVHGIAVHWYLDFLAPAKATLGETHRLFPNTMLFASEACV | |
| | GSKFWEQSVRLGSWDRGMQYSHSIITNLLYHVVGWTDWNLALNPEGGPN | |
| | WVRNFVDSPIIVDITKDTFYKQPMFYHLGHFSKFIPEGSQRVGLVASQK | |
| | NDLDAVALMHPDGSAVVVVLNRSSKDVPLTIKDPAVGFLETISPGYSIH | |
| | TYLWRRQ | |
| GBA1 Variant 2 | ATGGAGTTTTCAAGTCCTTCCAGAGAGGAATGTCCCAAGCCTTTGAGTA | 1776 |
| (signal sequence | GGGTAAGCATCATGGCTGGCAGCCTCACAGGATTGCTTCTACTTCAGGC | |
| underlined)-nt | AGTGTCGTGGGCATCAGGTGCCCGCCCCTGCATCCCTAAAAGCTTCGGC | |
| | TACAGCTCGGTGGTGTGTGTCTGCAATGCCACATACTGTGACTCCTTTG | |
| | ACCCCCCGACCTTTCCTGCCCTTGGTACCTTCAGCCGCTATGAGAGTAC | |
| | ACGCAGTGGGCGACGGATGGAGCTGAGTATGGGGCCCATCCAGGCTAAT | |
| | CACACGGGCACAGGCCTGCTACTGACCCTGCAGCCAGAACAGAAGTTCC | |
| | AGAAAGTGAAGGGATTTGGAGGGGCCATGACAGATGCTGCTGCTCTCAA | |
| | CATCCTTGCCCTGTCACCCCCTGCCCAAAATTTGCTACTTAAATCGTAC | |
| | TTCTCTGAAGAAGGAATCGGATATAACATCATCCGGGTACCCATGGCCA | |
| | GCTGTGACTTCTCCATCCGCACCTACACCTATGCAGACACCCCTGATGA | |
| | TTTCCAGTTGCACAACTTCAGCCTCCCAGAGGAAGATACCAAGCTCAAG | |
| | ATACCCCTGATTCACCGAGCCCTGCAGTTGGCCCAGCGTCCCGTTTCAC | |
| | TCCTTGCCAGCCCCTGGACATCACCCACTTGGCTCAAGACCAATGGAGC | |
| | GGTGAATGGGAAGGGGTCACTCAAGGGACAGCCCGGAGACATCTACCAC | |
| | CAGACCTGGGCCAGATACTTTGTGAAGTTCCTGGATGCCTATGCTGAGC | |
| | ACAAGTTACAGTTCTGGGCAGTGACAGCTGAAAATGAGCCTTCTGCTGG | |
| | GCTGTTGAGTGGATACCCCTTCCAGTGCCTGGGCTTCACCCCTGAACAT | |
| | CAGCGAGACTTCATTGCCCGTGACCTAGGTCCTACCCTCGCCAACAGTA | |
| | CTCACCACAATGTCCGCCTACTCATGCTGGATGACCAACGCTTGCTGCT | |
| | GCCCCACTGGGCAAAGGTGGTACTGACAGACCCAGAAGCAGCTAAATAT | |
| | GTTCATGGCATTGCTGTACATTGGTACCTGGACTTTCTGGCTCCAGCCA | |
| | AAGCCACCCTAGGGGAGACACACCGCCTGTTCCCCAACACCATGCTCTT | |
| | TGCCTCAGAGGCCTGTGTGGGCTCCAAGTTCTGGGAGCAGAGTGTGCGG | |
| | CTAGGCTCCTGGGATCGAGGGATGCAGTACAGCCACAGCATCATCACGA | |
| | ACCTCCTGTACCATGTGGTCGGCTGGACCGACTGGAACCTTGCCCTGAA | |
| | CCCCGAAGGAGGACCCAATTGGGTGCGTAACTTTGTCGACAGTCCCATC | |
| | ATTGTAGACATCACCAAGGACACGTTTTACAAACAGCCCATGTTCTACC | |
| | ACCTTGGCCACTTCAGCAAGTTCATTCCTGAGGGCTCCCAGAGAGTGGG | |
| | GCTGGTTGCCAGTCAGAAGAACGACCTGGACGCAGTGGCACTGATGCAT | |
| | CCCGATGGCTCTGCTGTTGTGGTCGTGCTAAACCGCTCCTCTAAGGATG | |
| | TGCCTCTTACCATCAAGGATCCTGCTGTGGGCTTCCTGGAGACAATCTC | |
| | ACCTGGCTACTCCATTCACACCTACCTGTGGCGTCGCCAG | |
| GBA1 Variant 2 | GCCCGCCCCTGCATCCCTAAAAGCTTCGGCTACAGCTCGGTGGTGTGTG | 1777 |
| (no signal | TCTGCAATGCCACATACTGTGACTCCTTTGACCCCCCGACCTTTCCTGC | |
| sequence)-nt | CCTTGGTACCTTCAGCCGCTATGAGAGTACACGCAGTGGGCGACGGATG | |
| | GAGCTGAGTATGGGGCCCATCCAGGCTAATCACACGGGCACAGGCCTGC | |
| | TACTGACCCTGCAGCCAGAACAGAAGTTCCAGAAAGTGAAGGGATTTGG | |
| | AGGGGCCATGACAGATGCTGCTGCTCTCAACATCCTTGCCCTGTCACCC | |
| | CCTGCCCAAAATTTGCTACTTAAATCGTACTTCTCTGAAGAAGGAATCG | |
| | GATATAACATCATCCGGGTACCCATGGCCAGCTGTGACTTCTCCATCCG | |
| | CACCTACACCTATGCAGACACCCCTGATGATTTCCAGTTGCACAACTTC | |
| | AGCCTCCCAGAGGAAGATACCAAGCTCAAGATACCCCTGATTCACCGAG | |
| | CCCTGCAGTTGGCCCAGCGTCCCGTTTCACTCCTTGCCAGCCCCTGGAC | |
| | ATCACCCACTTGGCTCAAGACCAATGGAGCGGTGAATGGGAAGGGGTCA | |
| | CTCAAGGGACAGCCCGGAGACATCTACCACCAGACCTGGGCCAGATACT | |
| | TTGTGAAGTTCCTGGATGCCTATGCTGAGCACAAGTTACAGTTCTGGGC | |
| | AGTGACAGCTGAAAATGAGCCTTCTGCTGGGCTGTTGAGTGGATACCCC | |
| | TTCCAGTGCCTGGGCTTCACCCCTGAACATCAGCGAGACTTCATTGCCC | |
| | GTGACCTAGGTCCTACCCTCGCCAACAGTACTCACCACAATGTCCGCCT | |
| | ACTCATGCTGGATGACCAACGCTTGCTGCTGCCCCACTGGGCAAAGGTG | |
| | GTACTGACAGACCCAGAAGCAGCTAAATATGTTCATGGCATTGCTGTAC | |
| | ATTGGTACCTGGACTTTCTGGCTCCAGCCAAAGCCACCCTAGGGGAGAC | |
| | ACACCGCCTGTTCCCCAACACCATGCTCTTTGCCTCAGAGGCCTGTGTG | |
| | GGCTCCAAGTTCTGGGAGCAGAGTGTGCGGCTAGGCTCCTGGGATCGAG | |
| | GGATGCAGTACAGCCACAGCATCATCACGAACCTCCTGTACCATGTGGT | |
| | CGGCTGGACCGACTGGAACCTTGCCCTGAACCCCGAAGGAGGACCCAAT | |
| | TGGGTGCGTAACTTTGTCGACAGTCCCATCATTGTAGACATCACCAAGG | |
| | ACACGTTTTACAAACAGCCCATGTTCTACCACCTTGGCCACTTCAGCAA | |
| | GTTCATTCCTGAGGGCTCCCAGAGAGTGGGGCTGGTTGCCAGTCAGAAG | |
| | AACGACCTGGACGCAGTGGCACTGATGCATCCCGATGGCTCTGCTGTTG | |
| | TGGTCGTGCTAAACCGCTCCTCTAAGGATGTGCCTCTTACCATCAAGGA | |
| | TCCTGCTGTGGGCTTCCTGGAGACAATCTCACCTGGCTACTCCATTCAC | |
| | ACCTACCTGTGGCGTCGCCAG | |
| GBA1 Variant 2 | MEFSSPSREECPKPLSRVSIMAGSLTGLLLLQAVSWASGARPCIPKSFG | 1778 |
| (signal sequence | YSSVVCVCNATYCDSFDPPTFPALGTFSRYESTRSGRRMELSMGPIQAN | |
| underlined)-aa | HTGTGLLLTLQPEQKFQKVKGFGGAMTDAAALNILALSPPAQNLLLKSY | |
| | FSEEGIGYNIIRVPMASCDFSIRTYTYADTPDDFQLHNFSLPEEDTKLK | |
| | IPLIHRALQLAQRPVSLLASPWTSPTWLKTNGAVNGKGSLKGQPGDIYH | |
| | QTWARYFVKFLDAYAEHKLQFWAVTAENEPSAGLLSGYPFQCLGFTPEH | |
| | QRDFIARDLGPTLANSTHHNVRLLMLDDQRLLLPHWAKVVLTDPEAAKY | |
| | VHGIAVHWYLDFLAPAKATLGETHRLFPNTMLFASEACVGSKFWEQSVR | |
| | LGSWDRGMQYSHSIITNLLYHVVGWTDWNLALNPEGGPNWVRNFVDSPI | |
| | IVDITKDTFYKQPMFYHLGHFSKFIPEGSQRVGLVASQKNDLDAVALMH | |
| | PDGSAVVVVLNRSSKDVPLTIKDPAVGFLETISPGYSIHTYLWRRQ | |
| GBA1 Variant 2 | ARPCIPKSFGYSSVVCVCNATYCDSFDPPTFPALGTFSRYESTRSGRRM | 1779 |
| (no signal | ELSMGPIQANHTGTGLLLTLQPEQKFQKVKGFGGAMTDAAALNILALSP | |
| sequence)-aa | PAQNLLLKSYFSEEGIGYNIIRVPMASCDFSIRTYTYADTPDDFQLHNF | |
| | SLPEEDTKLKIPLIHRALQLAQRPVSLLASPWTSPTWLKTNGAVNGKGS | |
| | LKGQPGDIYHQTWARYFVKFLDAYAEHKLQFWAVTAENEPSAGLLSGYP | |
| | FQCLGFTPEHQRDFIARDLGPTLANSTHHNVRLLMLDDQRLLLPHWAKV | |
| | VLTDPEAAKYVHGIAVHWYLDFLAPAKATLGETHRLFPNTMLFASEACV | |
| | GSKFWEQSVRLGSWDRGMQYSHSIITNLLYHVVGWTDWNLALNPEGGPN | |
| | WVRNFVDSPIIVDITKDTFYKQPMFYHLGHFSKFIPEGSQRVGLVASQK | |
| | NDLDAVALMHPDGSAVVVVLNRSSKDVPLTIKDPAVGFLETISPGYSIH | |
| | TYLWRRQ | |
| GBA1 Variant 3 | atggaattcagcagccccagcagagaggaatgccccaagcctctgagcc | 1780 |
| (signal sequence | gggtgtcaatcatggccggatctctgacaggactgctgctgcttcaggc | |
| underlined)-nt | cgtgtcttgggcttctggcgctagaccttgcatccccaagagcttcggc | |
| | tacagcagcgtcgtgtgcgtgtgcaatgccacctactgcgacagcttcg | |
| | accctcctacctttcctgctctgggcaccttcagcagatacgagagcac | |
| | cagatccggcagacggatggaactgagcatgggacccatccaggccaat | |
| | cacacaggcactggcctgctgctgacactgcagcctgagcagaaattcc | |
| | agaaagtgaaaggcttcggcggagccatgacagatgccgccgctctgaa | |
| | tatcctggctctgtctccaccagctcagaacctgctgctcaagagctac | |
| | ttcagcgaggaaggcatcggctacaacatcatcagagtgcccatggcca | |
| | gctgcgacttcagcatcaggacctacacctacgccgacacacccgacga | |
| | tttccagctgcacaacttcagcctgcctgaagaggacaccaagctgaag | |
| | atccctctgatccacagagccctgcagctggcacaaagacccgtgtcac | |
| | tgctggcctctccatggacatctcccacctggctgaaaacaaatggcgc | |
| | cgtgaatggcaagggcagcctgaaaggccaacctggcgacatctaccac | |
| | cagacctgggccagatacttcgtgaagttcctggacgcctatgccgagc | |
| | acaagctgcagttttgggccgtgacagccgagaacgaaccttctgctgg | |
| | actgctgagcggctacccctttcagtgcctgggctttacacccgagcac | |
| | cagcgggactttatcgcccgtgatctgggacccacactggccaatagca | |
| | cccaccataatgtgcggctgctgatgctggacgaccagagactgcttct | |
| | gccccactgggctaaagtggtgctgacagatcctgaggccgccaaatac | |
| | gtgcacggaatcgccgtgcactggtatctggactttctggcccctgcca | |
| | aggccacactgggagagacacacagactgttccccaacaccatgctgtt | |
| | cgccagcgaagcctgtgtgggcagcaagttttgggaacagagcgtgcgg | |
| | ctcggcagctgggatagaggcatgcagtacagccacagcatcatcacca | |
| | acctgctgtaccacgtcgtcggctggaccgactggaatctggccctgaa | |
| | tcctgaaggcggccctaactgggtccgaaacttcgtggacagccccatc | |
| | atcgtggacatcaccaaggacaccttctacaagcagcccatgttctacc | |
| | acctgggacacttcagcaagttcatccccgagggctctcagcgcgttgg | |
| | actggtggcttcccagaagaacgatctggacgccgtggctctgatgcac | |
| | cctgatggatctgctgtggtggtggtcctgaaccgcagcagcaaagatg | |
| | tgcccctgaccatcaaggatcccgccgtgggattcctggaaacaatcag | |
| | ccctggctactccatccacacctacctgtggcgtagacag | |
| GBA1 Variant 3 | gctagaccttgcatccccaagagcttcggctacagcagcgtcgtgtgcg | 1781 |
| (no signal | tgtgcaatgccacctactgcgacagcttcgaccctcctacctttcctgc | |
| sequence)-nt | tctgggcaccttcagcagatacgagagcaccagatccggcagacggatg | |
| | gaactgagcatgggacccatccaggccaatcacacaggcactggcctgc | |
| | tgctgacactgcagcctgagcagaaattccagaaagtgaaaggcttcgg | |
| | cggagccatgacagatgccgccgctctgaatatcctggctctgtctcca | |
| | ccagctcagaacctgctgctcaagagctacttcagcgaggaaggcatcg | |
| | gctacaacatcatcagagtgcccatggccagctgcgacttcagcatcag | |
| | gacctacacctacgccgacacacccgacgatttccagctgcacaacttc | |
| | agcctgcctgaagaggacaccaagctgaagatccctctgatccacagag | |
| | ccctgcagctggcacaaagacccgtgtcactgctggcctctccatggac | |
| | atctcccacctggctgaaaacaaatggcgccgtgaatggcaagggcagc | |
| | ctgaaaggccaacctggcgacatctaccaccagacctgggccagatact | |
| | tcgtgaagttcctggacgcctatgccgagcacaagctgcagttttgggc | |
| | cgtgacagccgagaacgaaccttctgctggactgctgagcggctacccc | |
| | tttcagtgcctgggctttacacccgagcaccagcgggactttatcgccc | |
| | gtgatctgggacccacactggccaatagcacccaccataatgtgcggct | |
| | gctgatgctggacgaccagagactgcttctgccccactgggctaaagtg | |
| | gtgctgacagatcctgaggccgccaaatacgtgcacggaatcgccgtgc | |
| | actggtatctggactttctggcccctgccaaggccacactgggagagac | |
| | acacagactgttccccaacaccatgctgttcgccagcgaagcctgtgtg | |
| | ggcagcaagttttgggaacagagcgtgcggctcggcagctgggatagag | |
| | gcatgcagtacagccacagcatcatcaccaacctgctgtaccacgtcgt | |
| | cggctggaccgactggaatctggccctgaatcctgaaggcggccctaac | |
| | tgggtccgaaacttcgtggacagccccatcatcgtggacatcaccaagg | |
| | acaccttctacaagcagcccatgttctaccacctgggacacttcagcaa | |
| | gttcatccccgagggctctcagcgcgttggactggtggcttcccagaag | |
| | aacgatctggacgccgtggctctgatgcaccctgatggatctgctgtgg | |
| | tggtggtcctgaaccgcagcagcaaagatgtgcccctgaccatcaagga | |
| | tcccgccgtgggattcctggaaacaatcagccctggctactccatccac | |
| | acctacctgtggcgtagacag | |
| GBA1 Variant 3 | MEFSSPSREECPKPLSRVSIMAGSLTGLLLLQAVSWASGARPCIPKSFG | 1782 |
| (signal sequence | YSSVVCVCNATYCDSFDPPTFPALGTFSRYESTRSGRRMELSMGPIQAN | |
| underlined)-aa | HTGTGLLLTLQPEQKFQKVKGFGGAMTDAAALNILALSPPAQNLLLKSY | |
| | FSEEGIGYNIIRVPMASCDFSIRTYTYADTPDDFQLHNFSLPEEDTKLK | |
| | IPLIHRALQLAQRPVSLLASPWTSPTWLKINGAVNGKGSLKGQPGDIYH | |
| | QTWARYFVKFLDAYAEHKLQFWAVTAENEPSAGLLSGYPFQCLGFTPEH | |
| | QRDFIARDLGPTLANSTHHNVRLLMLDDQRLLLPHWAKVVLTDPEAAKY | |
| | VHGIAVHWYLDFLAPAKATLGETHRLFPNTMLFASEACVGSKFWEQSVR | |
| | LGSWDRGMQYSHSIITNLLYHVVGWTDWNLALNPEGGPNWVRNFVDSPI | |
| | IVDITKDTFYKQPMFYHLGHFSKFIPEGSQRVGLVASQKNDLDAVALMH | |
| | PDGSAVVVVLNRSSKDVPLTIKDPAVGFLETISPGYSIHTYLWRRQ | |
| GBA1 Variant 3 | ARPCIPKSFGYSSVVCVCNATYCDSFDPPTFPALGTFSRYESTRSGRRM | 1783 |
| (no signal | ELSMGPIQANHTGTGLLLTLQPEQKFQKVKGFGGAMTDAAALNILALSP | |
| sequence)-aa | PAQNLLLKSYFSEEGIGYNIIRVPMASCDFSIRTYTYADTPDDFQLHNF | |
| | SLPEEDTKLKIPLIHRALQLAQRPVSLLASPWTSPTWLKINGAVNGKGS | |
| | LKGQPGDIYHQTWARYFVKFLDAYAEHKLQFWAVTAENEPSAGLLSGYP | |
| | FQCLGFTPEHQRDFIARDLGPTLANSTHHNVRLLMLDDQRLLLPHWAKV | |
| | VLTDPEAAKYVHGIAVHWYLDFLAPAKATLGETHRLFPNTMLFASEACV | |
| | GSKFWEQSVRLGSWDRGMQYSHSIITNLLYHVVGWTDWNLALNPEGGPN | |
| | WVRNFVDSPIIVDITKDTFYKQPMFYHLGHFSKFIPEGSQRVGLVASQK | |
| | NDLDAVALMHPDGSAVVVVLNRSSKDVPLTIKDPAVGFLETISPGYSIH | |
| | TYLWRRQ | |
| GBA1 Variant 4 | ATGGAATTCTCTAGCCCATCTAGAGAGGAATGTCCTAAGCCTCTGTCAA | 2001 |
| (signal sequence | GAGTGTCCATCATGGCTGGCAGCCTGACAGGCCTGCTGCTGCTGCAGGC | |
| underlined)-nt | TGTGTCCTGGGCCAGTGGAGCCAGGCCCTGCATCCCTAAGTCCTTTGGC | |
| | TATTCTTCTGTGGTCTGTGTGTGTAATGCCACTTACTGTGACAGCTTTG | |
| | ACCCTCCTACCTTCCCTGCCCTTGGAACATTCAGCAGATATGAGAGCAC | |
| | CAGATCTGGCAGAAGAATGGAACTGAGCATGGGCCCAATCCAGGCCAAC | |
| | CACACAGGCACAGGCCTCCTGCTGACACTGCAACCTGAGCAGAAGTTCC | |
| | AGAAGGTGAAGGGATTTGGAGGTGCCATGACAGATGCTGCTGCTCTGAA | |
| | CATCCTGGCCCTCTCCCCACCTGCTCAGAACCTGCTGCTTAAAAGCTAC | |
| | TTCTCTGAGGAAGGCATTGGCTATAACATCATCAGAGTGCCCATGGCCA | |
| | GCTGTGACTTCAGCATCAGAACATACACTTATGCTGATACACCTGATGA | |
| | CTTCCAACTGCACAACTTCAGTCTGCCTGAAGAGGACACAAAGCTGAAA | |
| | ATCCCCCTGATCCACAGGGCCCTCCAGCTGGCCCAGAGACCTGTGAGCC | |
| | TGCTGGCCTCTCCTTGGACAAGCCCCACCTGGCTGAAGACTAATGGAGC | |
| | TGTGAATGGCAAGGGCAGCCTGAAGGGCCAGCCTGGGGACATCTACCAC | |
| | CAAACCTGGGCTAGGTACTTTGTCAAATTCCTGGATGCCTATGCTGAGC | |
| | ATAAGCTGCAATTTTGGGCTGTTACAGCTGAGAATGAGCCTTCTGCAGG | |
| | CCTGCTGTCTGGATATCCTTTCCAGTGCCTGGGCTTCACCCCTGAGCAC | |
| | CAGAGAGACTTTATTGCCAGAGATCTGGGGCCAACCCTGGCTAACAGCA | |
| | CACACCACAATGTGAGGCTGCTGATGCTGGATGACCAGAGGCTGCTGCT | |
| | CCCCCACTGGGCCAAGGTGGTGCTGACAGATCCAGAGGCTGCCAAATAT | |
| | GTGCATGGGATTGCTGTCCACTGGTACCTGGATTTCCTGGCCCCTGCCA | |
| | AGGCCACCCTGGGAGAAACACATAGACTGTTTCCTAATACCATGCTGTT | |
| | TGCCTCTGAGGCCTGTGTGGGCAGCAAGTTCTGGGAACAATCTGTGAGA | |
| | CTGGGCAGCTGGGACAGAGGAATGCAGTACAGCCACAGCATCATTACCA | |
| | ACCTGCTGTATCATGTGGTGGGCTGGACAGACTGGAACCTGGCCCTCAA | |
| | CCCTGAAGGGGGCCCCAACTGGGTGAGGAACTTTGTGGACTCTCCTATC | |
| | ATTGTGGATATTACCAAGGATACCTTCTACAAGCAGCCTATGTTCTACC | |
| | ACCTGGGCCACTTCAGCAAGTTCATCCCAGAGGGATCTCAGAGGGTGGG | |
| | CCTTGTGGCATCTCAGAAAAATGACCTAGATGCTGTTGCCCTGATGCAC | |
| | CCTGATGGGTCAGCAGTGGTAGTGGTCCTGAATAGAAGCTCCAAGGATG | |
| | TGCCACTGACTATCAAGGACCCAGCTGTAGGATTTCTGGAAACCATCAG | |
| | TCCTGGGTACAGCATCCACACTTACCTCTGGAGGAGGCAG | |
| GBA1 Variant 4 | GCCAGGCCCTGCATCCCTAAGTCCTTTGGCTATTCTTCTGTGGTCTGTG | 2002 |
| (no signal | TGTGTAATGCCACTTACTGTGACAGCTTTGACCCTCCTACCTTCCCTGC | |
| sequence)-nt | CCTTGGAACATTCAGCAGATATGAGAGCACCAGATCTGGCAGAAGAATG | |
| | GAACTGAGCATGGGCCCAATCCAGGCCAACCACACAGGCACAGGCCTCC | |
| | TGCTGACACTGCAACCTGAGCAGAAGTTCCAGAAGGTGAAGGGATTTGG | |
| | AGGTGCCATGACAGATGCTGCTGCTCTGAACATCCTGGCCCTCTCCCCA | |
| | CCTGCTCAGAACCTGCTGCTTAAAAGCTACTTCTCTGAGGAAGGCATTG | |
| | GCTATAACATCATCAGAGTGCCCATGGCCAGCTGTGACTTCAGCATCAG | |
| | AACATACACTTATGCTGATACACCTGATGACTTCCAACTGCACAACTTC | |
| | AGTCTGCCTGAAGAGGACACAAAGCTGAAAATCCCCCTGATCCACAGGG | |
| | CCCTCCAGCTGGCCCAGAGACCTGTGAGCCTGCTGGCCTCTCCTTGGAC | |
| | AAGCCCCACCTGGCTGAAGACTAATGGAGCTGTGAATGGCAAGGGCAGC | |
| | CTGAAGGGCCAGCCTGGGGACATCTACCACCAAACCTGGGCTAGGTACT | |
| | TTGTCAAATTCCTGGATGCCTATGCTGAGCATAAGCTGCAATTTTGGGC | |
| | TGTTACAGCTGAGAATGAGCCTTCTGCAGGCCTGCTGTCTGGATATCCT | |
| | TTCCAGTGCCTGGGCTTCACCCCTGAGCACCAGAGAGACTTTATTGCCA | |
| | GAGATCTGGGGCCAACCCTGGCTAACAGCACACACCACAATGTGAGGCT | |
| | GCTGATGCTGGATGACCAGAGGCTGCTGCTCCCCCACTGGGCCAAGGTG | |
| | GTGCTGACAGATCCAGAGGCTGCCAAATATGTGCATGGGATTGCTGTCC | |
| | ACTGGTACCTGGATTTCCTGGCCCCTGCCAAGGCCACCCTGGGAGAAAC | |
| | ACATAGACTGTTTCCTAATACCATGCTGTTTGCCTCTGAGGCCTGTGTG | |
| | GGCAGCAAGTTCTGGGAACAATCTGTGAGACTGGGCAGCTGGGACAGAG | |
| | GAATGCAGTACAGCCACAGCATCATTACCAACCTGCTGTATCATGTGGT | |
| | GGGCTGGACAGACTGGAACCTGGCCCTCAACCCTGAAGGGGGCCCCAAC | |
| | TGGGTGAGGAACTTTGTGGACTCTCCTATCATTGTGGATATTACCAAGG | |
| | ATACCTTCTACAAGCAGCCTATGTTCTACCACCTGGGCCACTTCAGCAA | |
| | GTTCATCCCAGAGGGATCTCAGAGGGTGGGCCTTGTGGCATCTCAGAAA | |
| | AATGACCTAGATGCTGTTGCCCTGATGCACCCTGATGGGTCAGCAGTGG | |
| | TAGTGGTCCTGAATAGAAGCTCCAAGGATGTGCCACTGACTATCAAGGA | |
| | CCCAGCTGTAGGATTTCTGGAAACCATCAGTCCTGGGTACAGCATCCAC | |
| | ACTTACCTCTGGAGGAGGCAG | |

[0584] In some embodiments, a nucleotide sequence encoding a GBA1 protein described herein comprises a reduced number of CpG motifs (e.g., lacking all CpG motifs), e.g., relative to the nucleotide sequence of SEQ ID NO: 1776 or 1777.

[0585] In some embodiments, the encoded GBA1 protein comprises the amino acid sequence of SEQ ID NO: 1774 or SEQ ID NO: 1775.

[0586] In some embodiments, the nucleotide sequence encoding the GBA1 protein or functional variant thereof comprises the nucleotide sequence of SEQ ID NO: 2002. In some embodiments, the nucleotide sequence encoding the GBA1 protein comprises the sequence of SEQ ID NO: 2001, wherein the encoded GBA1 protein comprises a signal sequence, wherein the signal sequence is encoded by the nucleotide sequence of SEQ ID NO: 2005.

[0587] In some embodiments, a codon-optimized nucleotide sequence encoding a GBA1 protein described herein (e.g., SEQ ID NO: 2001 or SEQ ID NO: 2002) replaces a donor splice site, e.g., a nucleotide sequence comprising the sequence of AGGGTAAGC or nucleotides 49 of the 117 numbered according to the nucleotide sequence of SEQ ID NO: 1776, with the nucleotide sequence of AGAGTGTCC, e.g., comprising at least one, two, three, or four modifications, e.g., mutations relative to the nucleotide sequence of AGGGTAAGC, or nucleotides 49 of the 117 numbered according to the nucleotide sequence of SEQ ID NO: 1776. In some embodiments, a codon-optimized nucleotide sequence encoding a GBA1 protein described herein (e.g., SEQ ID NO: 2001 or SEQ ID NO: 2002) contains more than 121, 122, 123, 124, 125, 126, 127, 128, 129, 130, 131, 132, 133, 134, 135, 136, 137, 138, 139, 140 or more unique modifications, e.g., mutations, compared to the nucleotide sequence of SEQ ID NO: 1776. In some embodiments, a codon-optimized nucleotide sequence of a GBA1 protein described herein (e.g., SEQ ID NO: 2001 or SEQ ID NO: 2002) comprises a unique GC content profile. Without wishing to be bound by theory, it is believed that, in some embodiments, altering the GC-content of a nucleotide sequence of a GBA1 protein described herein enhances the expression of the codon-optimized nucleotide sequence in a cell (e.g., a human cell or a neuronal cell). In some embodiments, a codon-optimized nucleotide sequence of a GBA1 protein described herein (e.g., SEQ ID NO: 2001 or SEQ ID NO: 2002) has reduced GC-content relative to a wild-type GBA1 nucleotide sequence. In some embodiments, a codon-optimized nucleotide sequence of a GBA1 protein described herein (e.g., SEQ ID NO: 2001 or SEQ ID NO: 2002) comprises a reduced number of CpG motif motifs (e.g., lacking all CpG motifs) as compared to a wildtype GBA1 encoding sequence (e.g., comprising the nucleotide sequence of SEQ ID NO: 1776 or 1777). In some embodiments, a codon-optimized nucleotide sequence of a GBA1 protein described herein (e.g., SEQ ID NO: 2001 or SEQ ID NO: 2002) does not contain a CpG motif. Without wishing to be bound by theory, in some embodiments, sequences with depleted CpG nucleotides may reduce in vivo toxicity, e.g., immunogenicity.

[0588] In some embodiments, the viral genome comprises a payload region encoding a GCase protein. The encoded GCase protein may be derived from any species, such as, but not limited to human, non-human primate, or rodent.

[0589] In some embodiments, the viral genome comprises a payload region encoding a human (Homo sapiens) GCase protein. In some embodiments, the methods disclosed herein may be used to make the GCase protein.

### Payload Component: Enhancement Element

[0590] In some embodiments, a viral genome described herein encoding a GBA1 protein comprises an enhancement element or functional variant thereof. In some embodiments, the encoded enhancement comprises a prosaposin (PSAP) protein, a saposin C (SapC) protein, or functional variant thereof; a cell penetrating peptide (e.g., a ApoEII peptide, a TAT peptide, and/or a ApoB peptide) or functional variant thereof; or a lysosomal targeting signal or functional variant thereof.

[0591] In some embodiments, the viral genome comprises a payload region further encoding a prosaposin (PSAP) protein or a saposin C (SapC) protein or functional variant thereof, e.g., as described herein, e.g., in Table 3A or 3B.

TABLE 3A
Exemplary PSAP and Saposin Sequences

| SEQ ID | | | |
|---|---|---|---|
| NO: | Type | Species | Description |
| 1750 | Protein | Homo sapiens | Prosaposin isoform A preprotein, NP_002769.1 |
| 1751 | DNA | Homo sapiens | PSAP transcript variant 1, NM_002778.4 |
| 1752 | Protein | Homo sapiens | Prosaposin isoform B preprotein, NP_001035930.1 |
| 1753 | DNA | Homo sapiens | PSAP transcript variant 2, NM_001042465.3 |
| 1754 | Protein | Homo sapiens | Prosaposin isoform C preprotein, NP_001035931.1 |
| 1755 | DNA | Homo sapiens | PSAP transcript variant 3, NM_001042466.3 |
| 1756 | Protein | Homo sapiens | hSapA, amino acids 60 to 140 of SEQ ID NO: 1750: |
| | | | SLPCDICKDVVTAAGDMLKDNATEEEILVYLEKTCDWLPKPNMSASCK |
| | | | EIVDSYLPVILDIIKGEMSRPGEVCSALNLCES |
| 1757 | Protein | Homo sapiens | hSapB, amino acids 195 to 275 of SEQ ID NO: 1750: |
| | | | GDVCQDCIQMVTDIQTAVRTNSTFVQALVEHVKEECDRLGPGMADICK |
| | | | NYISQYSEIAI QMMMHMQPKEI CALVGFCDEVK |
| 1758 | Protein | Homo sapiens | hSapC, amino acids 311 to 390 of SEQ ID NO: 1750: |
| | | | SDVYCEVCEFLVKEVTKLIDNNKTEKEILDAFDKMCSKLPKSLSEECQ |
| | | | EVVDTYGSSILSILLEEVSPELVCSMLHLCSG |
| 1784 | Protein | Homo sapiens | hSapD, amino acids 405 to 486 of SEQ ID NO 1750: |
| | | | DGGFCEVCKKLVGYLDRNLEKNSTKQEILAALEKGCSFLPDPYOKQCDQ |
| | | | FVAEYEPVLIEILVEVMDPSFVCLKIGACPSAH |
| 1856 | DNA | Homo sapiens | Signal Sequence |
| | | | atgtacgccctcttcctcctggccagcctcctgggcgcggctctagcc |
| 1857 | Protein | Homo sapiens | Signal Sequence |
| | | | MYALFLLASLLGAALA |

TABLE 3B
Exemplary Enhancement Elements

| | | SEQ ID |
|---|---|---|
| Description | Sequence | NO: |
| PSAP or Saposin | | |
| PSAP | atgtacgccctcttcctcctggccagcctcctgggcgcggctctagc | 1858 |
| (signal sequence | cggcccggtccttggactgaaagaatgcaccaggggctcggcagtgt | |
| underlined)-nt | ggtgccagaatgtgaagacggcgtccgactgcggggcagtgaagcac | |
| | tgcctgcagaccgtttggaacaagccaacagtgaaatcccttccctg | |
| | cgacatatgcaaagacgttgtcaccgcagctggtgatatgctgaagg | |
| | acaatgccactgaggaggagatccttgtttacttggagaagacctgt | |
| | gactggcttccgaaaccgaacatgtctgcttcatgcaaggagatagt | |
| | ggactcctacctccctgtcatcctggacatcattaaaggagaaatga | |
| | gccgtcctggggaggtgtgctctgctctcaacctctgcgagtctctc | |
| | cagaagcacctagcagagctgaatcaccagaagcagctggagtccaa | |
| | taagatcccagagctggacatgactgaggtggtggcccccttcatgg | |
| | ccaacatccctctcctcctctaccctcaggacggcccccgcagcaag | |
| | ccccagccaaaggataatggggacgtttgccaggactgcattcagat | |
| | ggtgactgacatccagactgctgtacggaccaactccacctttgtcc | |
| | aggccttggtggaacatgtcaaggaggagtgtgaccgcctgggccct | |
| | ggcatggccgacatatgcaagaactatatcagccagtattctgaaat | |
| | tgctatccagatgatgatgcacatgcaacccaaggagatctgtgcgc | |
| | tggttgggttctgtgatgaggtgaaagagatgcccatgcagactctg | |
| | gtccccgccaaagtggcctccaagaatgtcatccctgccctggaact | |
| | ggtggagcccattaagaagcacgaggtcccagcaaagtctgatgttt | |
| | actgtgaggtgtgtgaattcctggtgaaggaggtgaccaagctgatt | |
| | gacaacaacaagactgagaaagaaatactcgacgcttttgacaaaat | |
| | gtgctcgaagctgccgaagtccctgtcggaagagtgccaggaggtgg | |
| | tggacacgtacggcagctccatcctgtccatcctgctggaggaggtc | |
| | agccctgagctggtgtgcagcatgctgcacctctgctctggcacgcg | |
| | gctgcctgcactgaccgttcacgtgactcagccaaaggacggtggct | |
| | tctgcgaagtgtgcaagaagctggtgggttatttggatcgcaacctg | |
| | gagaaaaacagcaccaagcaggagatcctggctgctcttgagaaagg | |
| | ctgcagcttcctgccagacccttaccagaagcagtgtgatcagtttg | |
| | tggcagagtacgagcccgtgctgatcgagatcctggtggaggtgatg | |
| | gatccttccttcgtgtgcttgaaaattggagcctgcccctcggccca | |
| | taagcccttgttgggaactgagaagtgtatatggggcccaagctact | |
| | ggtgccagaacacagagacagcagcccagtgcaatgctgtcgagcat | |
| | tgcaaacgccatgtgtggaactag | |
| PSAP | ggcccggtccttggactgaaagaatgcaccaggggctcggcagtgtg | 1859 |
| (no signal | gtgccagaatgtgaagacggcgtccgactgcggggcagtgaagcact | |
| sequence)-nt | gcctgcagaccgtttggaacaagccaacagtgaaatcccttccctgc | |
| | gacatatgcaaagacgttgtcaccgcagctggtgatatgctgaagga | |
| | caatgccactgaggaggagatccttgtttacttggagaagacctgtg | |
| | actggcttccgaaaccgaacatgtctgcttcatgcaaggagatagtg | |
| | gactcctacctccctgtcatcctggacatcattaaaggagaaatgag | |
| | ccgtcctggggaggtgtgctctgctctcaacctctgcgagtctctcc | |
| | agaagcacctagcagagctgaatcaccagaagcagctggagtccaat | |
| | aagatcccagagctggacatgactgaggtggtggcccccttcatggc | |
| | caacatccctctcctcctctaccctcaggacggcccccgcagcaagc | |
| | cccagccaaaggataatggggacgtttgccaggactgcattcagatg | |
| | gtgactgacatccagactgctgtacggaccaactccacctttgtcca | |
| | ggccttggtggaacatgtcaaggaggagtgtgaccgcctgggccctg | |
| | gcatggccgacatatgcaagaactatatcagccagtattctgaaatt | |
| | gctatccagatgatgatgcacatgcaacccaaggagatctgtgcgct | |
| | ggttgggttctgtgatgaggtgaaagagatgcccatgcagactctgg | |
| | tccccgccaaagtggcctccaagaatgtcatccctgccctggaactg | |
| | gtggagcccattaagaagcacgaggtcccagcaaagtctgatgttta | |
| | ctgtgaggtgtgtgaattcctggtgaaggaggtgaccaagctgattg | |
| | acaacaacaagactgagaaagaaatactcgacgcttttgacaaaatg | |
| | tgctcgaagctgccgaagtccctgtcggaagagtgccaggaggtggt | |
| | ggacacgtacggcagctccatcctgtccatcctgctggaggaggtca | |
| | gccctgagctggtgtgcagcatgctgcacctctgctctggcacgcgg | |
| | ctgcctgcactgaccgttcacgtgactcagccaaaggacggtggctt | |
| | ctgcgaagtgtgcaagaagctggtgggttatttggatcgcaacctgg | |
| | agaaaaacagcaccaagcaggagatcctggctgctcttgagaaaggc | |
| | tgcagcttcctgccagacccttaccagaagcagtgtgatcagtttgt | |
| | ggcagagtacgagcccgtgctgatcgagatcctggtggaggtgatgg | |
| | atccttccttcgtgtgcttgaaaattggagcctgcccctcggcccat | |
| | aagcccttgttgggaactgagaagtgtatatggggcccaagctactg | |
| | gtgccagaacacagagacagcagcccagtgcaatgctgtcgagcatt | |
| | gcaaacgccatgtgtggaactag | |
| PSAP | MYALFLLASLLGAALAGPVLGLKECTRGSAVWCQNVKTASDCGAVKH | 1750 |
| (signal sequence | CLQTVWNKPTVKSLPCDICKDVVTAAGDMLKDNATEEEILVYLEKTC | |
| underlined)-aa | DWLPKPNMSASCKEIVDSYLPVILDIIKGEMSRPGEVCSALNLCESL | |
| | QKHLAELNHQKQLESNKIPELDMTEVVAPFMANIPLLLYPQDGPRSK | |
| | PQPKDNGDVCQDCIQMVTDIQTAVRTNSTFVQALVEHVKEECDRLGP | |
| | GMADICKNYISQYSEIAIQMMMHMQPKEICALVGFCDEVKEMPMQTL | |
| | VPAKVASKNVIPALELVEPIKKHEVPAKSDVYCEVCEFLVKEVTKLI | |
| | DNNKTEKEILDAFDKMCSKLPKSLSEECQEVVDTYGSSILSILLEEV | |
| | SPELVCSMLHLCSGTRLPALTVHVTQPKDGGFCEVCKKLVGYLDRNL | |
| | EKNSTKQEILAALEKGCSFLPDPYQKQCDQFVAEYEPVLIEILVEVM | |
| | DPSFVCLKIGACPSAHKPLLGTEKCIWGPSYWCQNTETAAQCNAVEH | |
| | CKRHVWN | |
| PSAP | GPVLGLKECTRGSAVWCQNVKTASDCGAVKHCLQTVWNKPTVKSLPC | 1785 |
| (no signal | DICKDVVTAAGDMLKDNATEEEILVYLEKTCDWLPKPNMSASCKEIV | |
| sequence) | DSYLPVILDIIKGEMSRPGEVCSALNLCESLQKHLAELNHQKQLESN | |
| | KIPELDMTEVVAPFMANIPLLLYPQDGPRSKPQPKDNGDVCQDCIQM | |
| | VTDIQTAVRTNSTFVQALVEHVKEECDRLGPGMADICKNYISQYSEI | |
| | AIQMMMHMQPKEICALVGFCDEVKEMPMQTLVPAKVASKNVIPALEL | |
| | VEPIKKHEVPAKSDVYCEVCEFLVKEVTKLIDNNKTEKEILDAFDKM | |
| | CSKLPKSLSEECQEVVDTYGSSILSILLEEVSPELVCSMLHLCSGTR | |
| | LPALTVHVTQPKDGGFCEVCKKLVGYLDRNLEKNSTKQEILAALEKG | |
| | CSFLPDPYQKQCDQFVAEYEPVLIEILVEVMDPSFVCLKIGACPSAH | |
| | KPLLGTEKCIWGPSYWCQNTETAAQCNAVEHCKRHVWN | |
| SAPC | atgtacgccctcttcctcctggccagcctcctgggcgcggctctagc | 1786 |
| (signal sequence | cgtgaaagagatgcccatgcagactctggtccccgccaaagtggcct | |
| underlined)-nt | ccaagaatgtcatccctgccctggaactggtggagcccattaagaag | |
| | cacgaggtcccagcaaagtctgatgtttactgtgaggtgtgtgaatt | |
| | cctggtgaaggaggtgaccaagctgattgacaacaacaagactgaga | |
| | aagaaatactcgacgcttttgacaaaatgtgctcgaagctgccgaag | |
| | tccctgtcggaagagtgccaggaggtggtggacacgtacggcagctc | |
| | catcctgtccatcctgctggaggaggtcagccctgagctggtgtgca | |
| | gcatgctgcacctctgctctggc | |
| SAPC | gtgaaagagatgcccatgcagactctggtccccgccaaagtggcctc | 1787 |
| (no signal | caagaatgtcatccctgccctggaactggtggagcccattaagaagc | |
| sequence)-nt | acgaggtcccagcaaagtctgatgtttactgtgaggtgtgtgaattc | |
| | ctggtgaaggaggtgaccaagctgattgacaacaacaagactgagaa | |
| | agaaatactcgacgcttttgacaaaatgtgctcgaagctgccgaagt | |
| | ccctgtcggaagagtgccaggaggtggtggacacgtacggcagctcc | |
| | atcctgtccatcctgctggaggaggtcagccctgagctggtgtgcag | |
| | catgctgcacctctgctctggc | |
| SAPC | MYALFLLASLLGAALAVKEMPMQTLVPAKVASKNVIPALELVEPIKK | 1788 |
| (signal sequence | HEVPAKSDVYCEVCEFLVKEVTKLIDNNKTEKEILDAFDKMCSKLPK | |
| underlined)-aa | SLSEECQEVVDTYGSSILSILLEEVSPELVCSMLHLCSG | |
| SAPC | VKEMPMQTLVPAKVASKNVIPALELVEPIKKHEVPAKSDVYCEVCEF | 1789 |
| (no signal | LVKEVTKLIDNNKTEKEILDAFDKMCSKLPKSLSEECQEVVDTYGSS | |
| sequence)-aa | ILSILLEEVSPELVCSMLHLCSG | |
| SAPCv2 | atgtacgccctcttcctcctggccagcctcctgggcgcggctctagc | 1790 |
| (signal sequence | ctctgatgtttactgtgaggtgtgtgaattcctggtgaaggaggtga | |
| underlined)-nt | ccaagctgattgacaacaacaagactgagaaagaaatactcgacgct | |
| | tttgacaaaatgtgctcgaagctgccgaagtccctgtcggaagagtg | |
| | ccaggaggtggtggacacgtacggcagctccatcctgtccatcctgc | |
| | tggaggaggtcagccctgagctggtgtgcagcatgctgcacctctgc | |
| | tctggc | |
| SAPCv2 | tctgatgtttactgtgaggtgtgtgaattcctggtgaaggaggtgac | 1791 |
| (no signal | caagctgattgacaacaacaagactgagaaagaaatactcgacgctt | |
| sequence)-nt | ttgacaaaatgtgctcgaagctgccgaagtccctgtcggaagagtgc | |
| | caggaggtggtggacacgtacggcagctccatcctgtccatcctgct | |
| | ggaggaggtcagccctgagctggtgtgcagcatgctgcacctctgct | |
| | ctggc | |
| SAPCv2 | MYALFLLASLLGAALASDVYCEVCEFLVKEVTKLIDNNKTEKEILDA | 1792 |
| (signal sequence | FDKMCSKLPKSLSEECQEVVDTYGSSILSILLEEVSPELVCSMLHLC | |
| underlined)-aa | SG | |
| SAPCv2 | SDVYCEVCEFLVKEVTKLIDNNKTEKEILDAFDKMCSKLPKSLSEEC | 1758 |
| (no signal | QEVVDTYGSSILSILLEEVSPELVCSMLHLCSG | |
| sequence)-aa | | |
| Cell Penetrating | | |
| Peptides | | |
| TAT-nt | tatggcaggaaaaagcggaggcaaaggcgccgccccccccag | 1793 |
| TAT-aa | YGRKKRRQRRRPPQ | 1794 |
| ApoB-nt | tccgtaatcgacgccttacagtataagctggagggaaccaccagatt | 1795 |
| | gacaaggaaacgagggcttaagcttgctactgcactatccctgagca | |
| | ataaattt | |
| ApoB-aa | SVIDALQYKLEGTTRLTRKRGLKLATALSLSNKF | 1796 |
| ApoEII-nt | ctacggaagctgcggaagcggctactgctgcggaaacttcggaaacg | 1797 |
| | gctactg | |
| ApoEII-aa | LRKLRKRLLLRKLRKRLL | 1798 |
| Lysosomal | | |
| Targeting | | |
| Sequence (LTS) | | |
| LTS1-nt | aagtttgaaagacag | 1799 |
| LTS1-aa | KFERQ | 1800 |
| LTS2-nt | atgaaggagaccgctgctgcaaagttcgagagacagcatatggatag | 1801 |
| | ctccacaagcgccgca | |
| LTS2-aa | MKETAAAKFERQHMDSSTSAA | 1802 |
| LTS3-nt | cagaaaatcctggat | 1803 |
| LTS3-aa | QKILD | 1804 |
| LTS4-nt | Cagagattcttcgag | 1805 |
| LTS4-aa | QRFFE | 1806 |
| LTS5-nt | aagtttgaaagacagcagaaaatcctggatcagagattcttcgag | 1807 |
| LTS5-aa | KFERQQKILDQRFFE | 1808 |

### Exemplary GBA1 AAV Viral Genome Sequence Regions and ITR-to-ITR Sequences

[0592] In some embodiments, a viral genome, e.g., an AAV viral genome or vector genome, described herein, comprises a promoter operably linked to a transgene encoding a GBA1 protein. In some embodiments, the viral genome further comprises an inverted terminal repeat region, an enhancer, an intron, a miR binding site, a polyA region, or a combination thereof. Exemplary sequence regions within ITR-to-ITR sequences for viral genomes according to the description are provided in Table 4.

TABLE 4
Exemplary Viral Genome sequence regions in ITR-to-ITR constructs

| | | SEQ ID |
|---|---|---|
| Description | Sequence | NO: |
| ITR (130 nt) | ctgcgcgctcgctcgctcactgaggccgcccgggcaaagcccgggcgtcgggcg | 1829 |
| | acctttggtcgcccggcctcagtgagcgagcgagcgcgcagagagggagtggcc | |
| | aactccatcactaggggttcct | |
| ITR (130 nt) | aggaacccctagtgatggagttggccactccctctctgcgcgctcgctcgctca | 1830 |
| | ctgaggccgggcgaccaaaggtcgcccgacgcccgggctttgcccgggcggcct | |
| | cagtgagcgagcgagcgcgcag | |
| CMVie | GACATTGATTATTGACTAGTTATTAATAGTAATCAATTACGGGGTCATTAGTTC | 1831 |
| enhancer | ATAGCCCATATATGGAGTTCCGCGTTACATAACTTACGGTAAATGGCCCGCCTG | |
| | GCTGACCGCCCAACGACCCCCGCCCATTGACGTCAATAATGACGTATGTTCCCA | |
| | TAGTAACGCCAATAGGGACTTTCCATTGACGTCAATGGGTGGAGTATTTACGGT | |
| | AAACTGCCCACTTGGCAGTACATCAAGTGTATCATATGCCAAGTACGCCCCCTA | |
| | TTGACGTCAATGACGGTAAATGGCCCGCCTGGCATTATGCCCAGTACATGACCT | |
| | TATGGGACTTTCCTACTTGGCAGTACATCTACGTATTAGTCATCGCTATTACCA | |
| | TG | |
| CB promoter | ccacgttctgcttcactctccccatctcccccccctccccacccccaattttgt | 1834 |
| | atttatttattttttaattattttgtgcagcgatgggggcggggggggggggcg | |
| | cgcgccaggcggggcggggcggggcgaggggcggggcggggcgaggcggagagg | |
| | tgcggcggcagccaatcagagcggcgcgctccgaaagtttccttttatggcgag | |
| | gcggcggcggcggcggccctataaaaagcgaagcgcgcggcggg | |
| Human beta | tcagatcgcctggagacgccatccacgctgttttgacctccatagaagacaccg | 1842 |
| globin intron | ggaccgatccagcctccgcggattcgaatcccggccgggaacggtgcattggaa | |
| (hGBint) | cgcggattccccgtgccaagagtgacgtaagtaccgcctatagagtctataggc | |
| | ccacaaaaaatgctttcttcttttaatatacttttttgtttatcttatttctaa | |
| | tactttccctaatctctttctttcagggcaataatgatacaatgtatcatgcct | |
| | ctttgcaccattctaaagaataacagtgataatttctgggttaaggcaatagca | |
| | atatttctgcatataaatatttctgcatataaattgtaactgatgtaagaggtt | |
| | tcatattgctaatagcagctacaatccagctaccattctgcttttattttatgg | |
| | ttgggataaggctggattattctgagtccaagctaggcccttttgctaatcatg | |
| | ttcatacctcttatcttcctcccacagctcctgggcaacgtgctggtctgtgtg | |
| | ctggcccatcactttggcaaagaatt | |
| polyA signal | gatctttttccctctgccaaaaattatggggacatcatgaagccccttgagcat | 1846 |
| sequence | ctgacttctggctaataaaggaaatttattttcattgcaatagtgtgttggaat | |
| | tttttgtgtctctcactcg | |
| miR183 | AGTGAATTCTACCAGTGCCATA | 1847 |
| binding site | | |
| Spacer | GATAGTTA | |
| miR183 | AGTGAATTCTACCAGTGCCATAGATAGTTAAGTGAATTCTACCAGTGCCATAGA | 1849 |
| binding site | TAGTTAAGTGAATTCTACCAGTGCCATAGATAGTTAAGTGAATTCTACCAGTGC | |
| series | CATA | |
| Signal | ATGGAATTCTCTAGCCCATCTAGAGAGGAATGTCCTAAGCCTCTGTCAAGAGTG | 1850 |
| Sequence-nt | TCCATCATGGCCGGCAGCCTGACAGGCCTGCTGCTGCTGCAGGCCGTGTCCTGG | |
| | GCCAGTGGA | |
| Signal | ATGGAATTCTCTAGCCCATCTAGAGAGGAATGTCCTAAGCCTCTGTCAAGAGTG | 2005 |
| sequence-nt | TCCATCATGGCTGGCAGCCTGACAGGCCTGCTGCTGCTGCAGGCTGTGTCCTGG | |
| | GCCAGTGGA | |
| Signal | MEFSSPSREECPKPLSRVSIMAGSLTGLLLLQAVSWASG | 1853 |
| Sequence-aa | | |

[0593] In some embodiments, the viral genome comprises an inverted terminal repeat sequence region (ITR) provided in Table 4, or a nucleotide sequence with at least 70%, at least 75%, at least 80%, at least 85%, at least 90%, at least 95% or at least 99% sequence identity to any of the ITR sequences in Table 5.

[0594] This disclosure also provides, in some embodiments, a GBA1 protein encoded by SEQ ID NO 2001 or a nucleotide sequence having at least at least 93%, at least 94%, at least 95%, at least 97%, at least 98%, or at least 99% sequence identity thereto or SEQ ID NO 2002 or a nucleotide sequence having at least at least 94%, at least 95%, at least 96%, at least 97%, at least 98%, or at least 99% sequence identity thereto. In some embodiments, the viral genome comprises a promoter comprising the nucleotide sequence SEQ ID NO 1834 or a nucleotide sequence having at least at least 70%, at least 75%, at least 80%, at least 85%, at least 90%, at least 95%, or at least 99% sequence identity thereto.

[0595] In some embodiments, the viral genome of an AAV particle described herein comprises the nucleotide sequence, e.g., the nucleotide sequence from the 5′ ITR to the 3′ ITR, of the nucleotide sequences of SEQ ID NO: 2006 and SEQ ID NO: 2007 or a sequence that is at least 97%, at least 98%, or at least 99% identical thereto.

[0596] This disclosure also provides in some embodiments, a GBA1 protein (e.g., a GBA1 protein) encoded by SEQ ID NO: 2001 or a sequence that is at least 93% identical thereto or SEQ ID NO: 2002 or a sequence that is at least 94% identical thereto.

[0597] In some embodiments, a viral genome encoding a GBA1 protein is a wtGBA1 viral genome, wherein the viral genome comprises a codon-optimized nucleotide sequence encoding a wildtype GBA1 protein, wherein the nucleotide sequence comprises a reduced number of CpG nucleotides (e.g., lacking all CpG motifs), as compared to a wildtype GBA1 encoding sequence (e.g., comprising the nucleotide sequence of SEQ ID NO: 1776 or 1777). In some embodiments, a viral genome encoding a GBA1 protein is a wtGBA1 viral genome, wherein the viral genome comprises a codon-optimized nucleotide sequence encoding a wildtype GBA1 protein, wherein the nucleotide sequence does not comprise any CpG nucleotides.

TABLE 5
Exemplary Viral Genome (ITR-to-ITR) sequences

| | | SEQ | |
|---|---|---|---|
| Construct ID | Description (5′ to 3′) | ID NO: | Length |
| GBA_VG1 | ITR (SEQ ID NO: 1829); CMVie (SEQ ID NO: 1831); CB | 1759 | 3413 |
| | promoter (SEQ ID NO: 1834); human beta globin intron (hGBint) | | |
| | (SEQ ID NO: 1842); signal sequence (SEQ ID NO: 1852); GBA1 | | |
| | Variant 3 coding sequence (SEQ ID NO: 1781); polyA signal | | |
| | region (SEQ ID NO: 1846); ITR (SEQ ID NO: 1830) | | |
| GBA_VG2 | ITR (SEQ ID NO: 1829); CMVie (SEQ ID NO: 1831); CB | 1760 | 3428 |
| | promoter (SEQ ID NO: 1834); human beta globin intron (hGBint) | | |
| | (SEQ ID NO: 1842); signal sequence (SEQ ID NO: 1852); GBA1 | | |
| | Variant 3 coding sequence (SEQ ID NO: 1781); Lysosomal | | |
| | targeting sequence 1 (LTS1) (SEQ ID NO: 1799); polyA signal | | |
| | region (SEQ ID NO: 1846); ITR (SEQ ID NO: 1830) | | |
| GBA_VG3 | ITR (SEQ ID NO: 1829); CMVie (SEQ ID NO: 1831); CB | 1761 | 3476 |
| | promoter (SEQ ID NO: 1834); human beta globin intron (hGBint) | | |
| | (SEQ ID NO: 1842); signal sequence (SEQ ID NO: 1852); | | |
| | Lysosomal targeting sequence 2 (LTS2) (SEQ ID NO: 1801); | | |
| | GBA1 Variant 3 coding sequence (SEQ ID NO: 1781); polyA | | |
| | signal region (SEQ ID NO: 1846); ITR (SEQ ID NO: 1830) | | |
| GBA_VG4 | ITR (SEQ ID NO: 1829); CMVie (SEQ ID NO: 1831); CB | 1762 | 3428 |
| | promoter (SEQ ID NO: 1834); human beta globin intron (hGBint) | | |
| | (SEQ ID NO: 1842); signal sequence (SEQ ID NO: 1852); GBA1 | | |
| | Variant 3 coding sequence (SEQ ID NO: 1781); Lysosomal | | |
| | targeting sequence 3 (LTS3) (SEQ ID NO: 1803); polyA signal | | |
| | region (SEQ ID NO: 1846); ITR (SEQ ID NO: 1830) | | |
| GBA_VG5 | ITR (SEQ ID NO: 1829); CMVie (SEQ ID NO: 1831); CB | 1763 | 3428 |
| | promoter (SEQ ID NO: 1834); human beta globin intron (hGBint) | | |
| | (SEQ ID NO: 1842); signal sequence (SEQ ID NO: 1852); GBA1 | | |
| | Variant 3 coding sequence (SEQ ID NO: 1781); Lysosomal | | |
| | targeting sequence 4 (LTS4) (SEQ ID NO: 1805); polyA signal | | |
| | region (SEQ ID NO: 1846); ITR (SEQ ID NO: 1830) | | |
| GBA_VG6 | ITR (SEQ ID NO: 1829); CMVie (SEQ ID NO: 1831); CB | 1764 | 3512 |
| | promoter (SEQ ID NO: 1834); human beta globin intron (hGBint) | | |
| | (SEQ ID NO: 1842); signal sequence (SEQ ID NO: 1852); GBA1 | | |
| | Variant 3 coding sequence (SEQ ID NO: 1781); G4S3 linker | | |
| | coding sequence (SEQ ID NO: 1730); ApoEII coding sequence | | |
| | (SEQ ID NO: 1797); polyA signal region (SEQ ID NO: 1846); | | |
| | ITR (SEQ ID NO: 1830) | | |
| GBA_VG7 | ITR (SEQ ID NO: 1829); CMVie (SEQ ID NO: 1831); CB | 1765 | 3500 |
| | promoter (SEQ ID NO: 1834); human beta globin intron (hGBint) | | |
| | (SEQ ID NO: 1842); signal sequence (SEQ ID NO: 1852); GBA1 | | |
| | Variant 3 coding sequence (SEQ ID NO: 1781); G4S3 linker | | |
| | coding sequence (SEQ ID NO: 1730); TAT coding sequence (SEQ | | |
| | ID NO: 1793); polyA signal region (SEQ ID NO: 1846); ITR | | |
| | (SEQ ID NO: 1830) | | |
| GBA_VG8 | ITR (SEQ ID NO: 1829); CMVie (SEQ ID NO: 1831); CB | 1766 | 4463 |
| | promoter (SEQ ID NO: 1834); signal sequence (SEQ ID NO: | | |
| | 1852); GBA1 Variant 3 coding sequence (SEQ ID NO: 1781); | | |
| | Furin cleavage site coding sequence (SEQ ID NO: 1724); T2A | | |
| | coding sequence (SEQ ID NO: 1726); signal sequence (SEQ ID | | |
| | NO: 1856); Prosaposin (PSAP) coding sequence (SEQ ID NO: | | |
| | 1859); polyA signal region (SEQ ID NO: 1846); ITR (SEQ ID | | |
| | NO: 1830) | | |
| GBA_VG9 | ITR (SEQ ID NO: 1829); CMVie (SEQ ID NO: 1831); CB | 1767 | 3878 |
| | promoter (SEQ ID NO: 1834); human beta globin intron (hGBint) | | |
| | (SEQ ID NO: 1842); signal sequence (SEQ ID NO: 1852); GBA1 | | |
| | Variant 3 coding sequence (SEQ ID NO: 1781); Furin cleavage | | |
| | site coding sequence (SEQ ID NO: 1724); T2A coding sequence | | |
| | (SEQ ID NO: 1726); signal sequence (SEQ ID NO: 1856); SAPC | | |
| | coding sequence (SEQ ID NO: 1787); polyA signal region (SEQ | | |
| | ID NO: 1846); ITR (SEQ ID NO: 1830) | | |
| GBA_VG10 | ITR (SEQ ID NO: 1829); CMVie (SEQ ID NO: 1831); CB | 1768 | 3767 |
| | promoter (SEQ ID NO: 1834); human beta globin intron (hGBint) | | |
| | (SEQ ID NO: 1842); signal sequence (SEQ ID NO: 1852); GBA1 | | |
| | Variant 3 coding sequence (SEQ ID NO: 1781); Furin cleavage | | |
| | site coding sequence (SEQ ID NO: 1724); T2A coding sequence | | |
| | (SEQ ID NO: 1726); signal sequence (SEQ ID NO: 1856); | | |
| | SAPCv2 coding sequence (SEQ ID NO: 1791); polyA signal | | |
| | region (SEQ ID NO: 1846); ITR (SEQ ID NO: 1830) | | |
| GBA_VG11 | ITR (SEQ ID NO: 1829); CMVie (SEQ ID NO: 1831); CB | 1769 | 3560 |
| | promoter (SEQ ID NO: 1834); human beta globin intron (hGBint) | | |
| | (SEQ ID NO: 1842); signal sequence (SEQ ID NO: 1852); GBA1 | | |
| | Variant 3 coding sequence (SEQ ID NO: 1781); G4S3 linker | | |
| | coding sequence (SEQ ID NO: 1730); ApoB coding sequence | | |
| | (SEQ ID NO: 1795); polyA signal region (SEQ ID NO: 1846); | | |
| | ITR (SEQ ID NO: 1830) | | |
| GBA_VG12 | ITR (SEQ ID NO: 1829); CMVie (SEQ ID NO: 1831); CB | 1770 | 3500 |
| | promoter (SEQ ID NO: 1834); human beta globin intron (hGBint) | | |
| | (SEQ ID NO: 1842); signal sequence (SEQ ID NO: 1852); TAT | | |
| | coding sequence (SEQ ID NO: 1793); G4S3 linker coding | | |
| | sequence (SEQ ID NO: 1730); GBA1 Variant 3 coding sequence | | |
| | (SEQ ID NO: 1781); polyA signal region (SEQ ID NO: 1846); | | |
| | ITR (SEQ ID NO: 1830) | | |
| GBA_VG13 | ITR (SEQ ID NO: 1829); CMVie (SEQ ID NO: 1831); CB | 1771 | 3458 |
| | promoter (SEQ ID NO: 1834); human beta globin intron (hGBint) | | |
| | (SEQ ID NO: 1842); signal sequence (SEQ ID NO: 1852); GBA1 | | |
| | Variant 3 coding sequence (SEQ ID NO: 1781); Lysosomal | | |
| | targeting sequence 5 (LTS5) (SEQ ID NO: 1807); polyA signal | | |
| | region (SEQ ID NO: 1846); ITR (SEQ ID NO: 1830) | | |
| GBA_VG14 | ITR (SEQ ID NO: 1829); CMVie (SEQ ID NO: 1831); CB | 1809 | 3941 |
| | promoter (SEQ ID NO: 1834); human beta globin intron (hGBint) | | |
| | (SEQ ID NO: 1842); signal sequence (SEQ ID NO: 1852); | | |
| | Lysosomal targeting sequence 2 (LTS2) (SEQ ID NO: 1801); | | |
| | GBA1 Variant 3 coding sequence (SEQ ID NO: 1781); Furin | | |
| | cleavage site coding sequence (SEQ ID NO: 1724); T2A coding | | |
| | sequence (SEQ ID NO: 1726); signal sequence (SEQ ID NO: | | |
| | 1856); SAPC coding sequence (SEQ ID NO: 1787); polyA signal | | |
| | region (SEQ ID NO: 1846); ITR (SEQ ID NO: 1830) | | |
| GBA_VG15 | ITR (SEQ ID NO: 1829); CMVie (SEQ ID NO: 1831); CB | 1810 | 3977 |
| | promoter (SEQ ID NO: 1834); human beta globin intron (hGBint) | | |
| | (SEQ ID NO: 1842); signal sequence (SEQ ID NO: 1852); GBA1 | | |
| | Variant 3 coding sequence (SEQ ID NO: 1781); G4S3 linker | | |
| | coding sequence (SEQ ID NO: 1730); ApoEII coding sequence | | |
| | (SEQ ID NO: 1797); Furin cleavage site coding sequence (SEQ ID | | |
| | NO: 1724); T2A coding sequence (SEQ ID NO: 1726); signal | | |
| | sequence (SEQ ID NO: 1856); SAPC coding sequence (SEQ ID | | |
| | NO: 1787); polyA signal region (SEQ ID NO: 1846); ITR (SEQ | | |
| | ID NO: 1830) | | |
| GBA_VG16 | ITR (SEQ ID NO: 1829); CMVie (SEQ ID NO: 1831); CB | 1811 | 4040 |
| | promoter (SEQ ID NO: 1834); human beta globin intron | | |
| | (hGBint) (SEQ ID NO: 1842); signal sequence (SEQ ID NO: | | |
| | 1852); Lysosomal targeting sequence 2 (LTS2) (SEQ ID NO: | | |
| | 1801); GBA1 Variant 3 coding sequence (SEQ ID NO: 1781); | | |
| | G4S3 linker coding sequence (SEQ ID NO: 1730); ApoEII | | |
| | coding sequence (SEQ ID NO: 1797); Furin cleavage site coding | | |
| | sequence (SEQ ID NO: 1724); T2A coding sequence (SEQ ID | | |
| | NO: 1726); signal sequence (SEQ ID NO: 1856); SAPC coding | | |
| | sequence (SEQ ID NO: 1787); polyA signal region (SEQ ID NO: | | |
| | 1846); ITR (SEQ ID NO: 1830) | | |
| GBA_VG17 | ITR (SEQ ID NO: 1829); CMVie (SEQ ID NO: 1831); CB | 1812 | 3413 |
| | promoter (SEQ ID NO: 1834); human beta globin intron (hGBint) | | |
| | (SEQ ID NO: 1842); signal sequence (SEQ ID NO: 1850); GBA1 | | |
| | Variant 1 coding sequence (SEQ ID NO: 1773); polyA signal | | |
| | region (SEQ ID NO: 1846); ITR (SEQ ID NO: 1830) | | |
| GBA_VG18 | ITR (SEQ ID NO: 1829); EF-1α promoter variant 2 (SEQ ID NO: | 1813 | 3375 |
| | 1839); signal sequence (SEQ ID NO: 1850); GBA1 Variant 1 | | |
| | coding sequence (SEQ ID NO: 1773); polyA signal region (SEQ | | |
| | ID NO: 1846); ITR (SEQ ID NO: 1830) | | |
| GBA_VG19 | ITR (SEQ ID NO: 1829); CMVie (SEQ ID NO: 1831); CMV | 1814 | 3360 |
| | promoter (SEQ ID NO: 1832); human beta globin intron (hGBint) | | |
| | (SEQ ID NO: 1842); signal sequence (SEQ ID NO: 1850); GBA1 | | |
| | Variant 1 coding sequence (SEQ ID NO: 1773); polyA signal | | |
| | region (SEQ ID NO: 1846); ITR (SEQ ID NO: 1830) | | |
| GBA_VG20 | ITR (SEQ ID NO: 1829); CAG promoter (SEQ ID NO: 1835); | 1815 | 3901 |
| | signal sequence (SEQ ID NO: 1850); GBA1 Variant 1 coding | | |
| | sequence (SEQ ID NO: 1773); polyA signal region (SEQ ID NO: | | |
| | 1846); ITR (SEQ ID NO: 1830) | | |
| GBA_VG21 | ITR (SEQ ID NO: 1829); CMVie (SEQ ID NO: 1831); CB | 1816 | 3413 |
| | promoter (SEQ ID NO: 1834); human beta globin intron (hGBint) | | |
| | (SEQ ID NO: 1842); signal sequence (SEQ ID NO: 1851); GBA1 | | |
| | Variant 2 coding sequence (SEQ ID NO: 1777); polyA signal | | |
| | region (SEQ ID NO: 1846); ITR (SEQ ID NO: 1830) | | |
| GBA_VG22 | ITR (SEQ ID NO: 1829); CMVie (SEQ ID NO: 1831); CB | 1817 | 3878 |
| | promoter (SEQ ID NO: 1834); human beta globin intron (hGBint) | | |
| | (SEQ ID NO: 1842); signal sequence (SEQ ID NO: 1851); GBA1 | | |
| | Variant 2 coding sequence (SEQ ID NO: 1777); Furin cleavage | | |
| | site coding sequence (SEQ ID NO: 1724); T2A coding sequence | | |
| | (SEQ ID NO: 1726); signal sequence (SEQ ID NO: 1856); SAPC | | |
| | coding sequence (SEQ ID NO: 1787); polyA signal region (SEQ | | |
| | ID NO: 1846); ITR (SEQ ID NO: 1830) | | |
| GBA_VG23 | ITR (SEQ ID NO: 1829); CMVie (SEQ ID NO: 1831); CB | 1818 | 3512 |
| | promoter (SEQ ID NO: 1834); human beta globin intron (hGBint) | | |
| | (SEQ ID NO: 1842); signal sequence (SEQ ID NO: 1851); GBA1 | | |
| | Variant 2 coding sequence (SEQ ID NO: 1777); G4S3 linker | | |
| | coding sequence (SEQ ID NO: 1730); ApoEII coding sequence | | |
| | (SEQ ID NO: 1797); polyA signal region (SEQ ID NO: 1846); | | |
| | ITR (SEQ ID NO: 1830) | | |
| GBA_VG24 | ITR (SEQ ID NO: 1829); CMVie (SEQ ID NO: 1831); CB | 1819 | 3476 |
| | promoter (SEQ ID NO: 1834); human beta globin intron (hGBint) | | |
| | (SEQ ID NO: 1842); signal sequence (SEQ ID NO: 1851); | | |
| | Lysosomal targeting sequence 2 (LTS2) (SEQ ID NO: 1801); | | |
| | GBA1 Variant 2 coding sequence (SEQ ID NO: 1777); polyA | | |
| | signal region (SEQ ID NO: 1846); ITR (SEQ ID NO: 1830) | | |
| GBA_VG25 | ITR (SEQ ID NO: 1829); CMVie (SEQ ID NO: 1831); CB | 1820 | 3428 |
| | promoter (SEQ ID NO: 1834); human beta globin intron (hGBint) | | |
| | (SEQ ID NO: 1842); signal sequence (SEQ ID NO: 1851); GBA1 | | |
| | Variant 2 coding sequence (SEQ ID NO: 1777); Lysosomal | | |
| | targeting sequence 4 (LTS4) (SEQ ID NO: 1805); polyA signal | | |
| | region (SEQ ID NO: 1846); ITR (SEQ ID NO: 1830) | | |
| GBA_VG26 | ITR (SEQ ID NO: 1829); EF -1α promoter variant 3 (SEQ ID NO: | 1821 | 3375 |
| | 1840); signal sequence (SEQ ID NO: 1851); GBA1 Variant 2 | | |
| | coding sequence (SEQ ID NO: 1777); polyA signal region (SEQ | | |
| | ID NO: 1846); ITR (SEQ ID NO: 1830) | | |
| GBA_VG27 | ITR (SEQ ID NO: 1829); CMVie (SEQ ID NO: 1831); CB | 1822 | 3878 |
| | promoter (SEQ ID NO: 1834); human beta globin intron (hGBint) | | |
| | (SEQ ID NO: 1842); signal sequence (SEQ ID NO: 1850); GBA1 | | |
| | Variant 1 coding sequence (SEQ ID NO: 1773); Furin cleavage | | |
| | site coding sequence (SEQ ID NO: 1724); T2A coding sequence | | |
| | (SEQ ID NO: 1726); signal sequence (SEQ ID NO: 1856); SAPC | | |
| | coding sequence (SEQ ID NO: 1787); polyA signal region (SEQ | | |
| | ID NO: 1846); ITR (SEQ ID NO: 1830) | | |
| GBA_VG28 | ITR (SEQ ID NO: 1829); CMVie (SEQ ID NO: 1831); CB | 1823 | 3512 |
| | promoter (SEQ ID NO: 1834); human beta globin intron (hGBint) | | |
| | (SEQ ID NO: 1842); signal sequence (SEQ ID NO: 1850); GBA1 | | |
| | Variant 1 coding sequence (SEQ ID NO: 1773); G4S3 linker | | |
| | coding sequence (SEQ ID NO: 1730); ApoEII coding sequence | | |
| | (SEQ ID NO: 1797); polyA signal region (SEQ ID NO: 1846); | | |
| | ITR (SEQ ID NO: 1830) | | |
| GBA_VG29 | ITR (SEQ ID NO: 1829); CMVie (SEQ ID NO: 1831); CB | 1824 | 3476 |
| | promoter (SEQ ID NO: 1834); human beta globin intron (hGBint) | | |
| | (SEQ ID NO: 1842); signal sequence (SEQ ID NO: 1850); | | |
| | Lysosomal targeting sequence 2 (LTS2) (SEQ ID NO: 1801); | | |
| | GBA1 Variant 1 coding sequence (SEQ ID NO: 1773); polyA | | |
| | signal region (SEQ ID NO: 1846); ITR (SEQ ID NO: 1830) | | |
| GBA_VG30 | ITR (SEQ ID NO: 1829); CMVie (SEQ ID NO: 1831); CB | 1825 | 3428 |
| | promoter (SEQ ID NO: 1834); human beta globin intron (hGBint) | | |
| | (SEQ ID NO: 1842); signal sequence (SEQ ID NO: 1850); GBA1 | | |
| | Variant 1 coding sequence (SEQ ID NO: 1773); Lysosomal | | |
| | targeting sequence 4 (LTS4) (SEQ ID NO: 1805); polyA signal | | |
| | region (SEQ ID NO: 1846); ITR (SEQ ID NO: 1830) | | |
| GBA_VG31 | ITR (SEQ ID NO: 1829); CMVie (SEQ ID NO: 1831); CB | 1826 | 3500 |
| | promoter (SEQ ID NO: 1834); human beta globin intron (hGBint) | | |
| | (SEQ ID NO: 1842); signal sequence (SEQ ID NO: 1851); GBA1 | | |
| | Variant 2 coding sequence (SEQ ID NO: 1777); G4S3 linker | | |
| | coding sequence (SEQ ID NO: 1730); TAT coding sequence (SEQ | | |
| | ID NO: 1793); polyA signal region (SEQ ID NO: 1846); ITR | | |
| | (SEQ ID NO: 1830) | | |
| GBA_VG32 | ITR (SEQ ID NO: 1829); CMVie (SEQ ID NO: 1831); CB | 1827 | 3500 |
| | promoter (SEQ ID NO: 1834); human beta globin intron (hGBint) | | |
| | (SEQ ID NO: 1842); signal sequence (SEQ ID NO: 1850); GBA1 | | |
| | Variant 1 coding sequence (SEQ ID NO: 1773); G4S3 linker | | |
| | coding sequence (SEQ ID NO: 1730); TAT coding sequence (SEQ | | |
| | ID NO: 1793); polyA signal region (SEQ ID NO: 1846); ITR | | |
| | (SEQ ID NO: 1830) | | |
| GBA_VG33 | ITR (SEQ ID NO: 1829); CMVie (SEQ ID NO: 1831); CB | 1828 | 3571 |
| | promoter (SEQ ID NO: 1834); human beta globin intron (hGBint) | | |
| | (SEQ ID NO: 1842); signal sequence (SEQ ID NO: 1850); GBA1 | | |
| | Variant 1 coding sequence (SEQ ID NO: 1773); miR183 binding | | |
| | site (SEQ ID NO: 1847); Spacer (SEQ ID NO: 1848); miR183 | | |
| | binding site (SEQ ID NO: 1847); Spacer (SEQ ID NO: 1848); | | |
| | miR183 binding site (SEQ ID NO: 1847); Spacer (SEQ ID NO: | | |
| | 1848); mir183 binding site (SEQ ID NO: 1847); polyA signal | | |
| | region (SEQ ID NO: 1846); ITR (SEQ ID NO: 1830) | | |
| GBA_VG34 | ITR (SEQ ID NO: 1829); CMVie (SEQ ID NO: 1831); CB | 1870 | 3571 |
| | promoter (SEQ ID NO: 1834); human beta globin intron (hGBint) | | |
| | (SEQ ID NO: 1842); signal sequence (SEQ ID NO: 1851); GBA1 | | |
| | Variant 2 coding sequence (SEQ ID NO: 1777); miR183 binding | | |
| | site (SEQ ID NO: 1847); Spacer (SEQ ID NO: 1848); miR183 | | |
| | binding site (SEQ ID NO: 1847); Spacer (SEQ ID NO: 1848); | | |
| | miR183 binding site (SEQ ID NO: 1847); Spacer (SEQ ID NO: | | |
| | 1848); mir183 binding site (SEQ ID NO: 1847); polyA signal | | |
| | region (SEQ ID NO: 1846); ITR (SEQ ID NO: 1830) | | |
| GBA1_VG35 | ITR (SEQ ID NO: 1829); CMVie (SEQ ID NO: 1831); CB | 2006 | 3413 |
| | promoter (SEQ ID NO: 1834); human beta globin intron (hGBint) | | |
| | (SEQ ID NO: 1842); signal sequence (SEQ ID NO: 2005); GBA1 | | |
| | Variant 4 coding sequence (SEQ ID NO: 2002); polyA signal | | |
| | region (SEQ ID NO: 1846); ITR (SEQ ID NO: 1830) | | |
| GBA_VG36 | ITR (SEQ ID NO: 1829); CMVie (SEQ ID NO: 1831); CB | 2007 | 3571 |
| | promoter (SEQ ID NO: 1834); human beta globin intron (hGBint) | | |
| | (SEQ ID NO: 1842); signal sequence (SEQ ID NO: 2005); GBA1 | | |
| | Variant 4 coding sequence (SEQ ID NO: 2002); miR183 binding | | |
| | site (SEQ ID NO: 1847); Spacer (SEQ ID NO: 1848); miR183 | | |
| | binding site (SEQ ID NO: 1847); Spacer (SEQ ID NO: 1848); | | |
| | miR183 binding site (SEQ ID NO: 1847); Spacer (SEQ ID NO: | | |
| | 1848); miR183 binding site (SEQ ID NO: 1847); polyA signal | | |
| | region (SEQ ID NO: 1846); ITR (SEQ ID NO: 1830) | | |

TABLE 6
Exemplary ITR-to-ITR sequences encoding a GBA1 protein

| Construct | | SEQ ID |
|---|---|---|
| ID | Sequence | NO: |
| GBA VG17 | ctgcgcgctcgctcgctcactgaggccgcccgggcaaagcccgggcgtcgggcgac | 1812 |
| | ctttggtcgcccggcctcagtgagcgagcgagcgcgcagagagggagtggccaact | |
| | ccatcactaggggttccttgtagttaatgattaacccgccatgctacttatctacc | |
| | agggtaatggggatcctctagaactatagctagtcGACATTGATTATTGACTAGTT | |
| | ATTAATAGTAATCAATTACGGGGTCATTAGTTCATAGCCCATATATGGAGTTCCGC | |
| | GTTACATAACTTACGGTAAATGGCCCGCCTGGCTGACCGCCCAACGACCCCCGCCC | |
| | ATTGACGTCAATAATGACGTATGTTCCCATAGTAACGCCAATAGGGACTTTCCATT | |
| | GACGTCAATGGGTGGAGTATTTACGGTAAACTGCCCACTTGGCAGTACATCAAGTG | |
| | TATCATATGCCAAGTACGCCCCCTATTGACGTCAATGACGGTAAATGGCCCGCCTG | |
| | GCATTATGCCCAGTACATGACCTTATGGGACTTTCCTACTTGGCAGTACATCTACG | |
| | TATTAGTCATCGCTATTACCATGtcgaggccacgttctgcttcactctccccatct | |
| | cccccccctccccacccccaattttgtatttatttattttttaattattttgtgca | |
| | gcgatgggggcggggggggggggcgcgcgccaggcggggcggggcggggcgagggg | |
| | cggggcggggcgaggcggagaggtgcggcggcagccaatcagagcggcgcgctccg | |
| | aaagtttccttttatggcgaggcggcggcggcggcggccctataaaaagcgaagcg | |
| | cgcggcgggcgggagcaagcttcgtttagtgaaccgtcagatcgcctggagacgcc | |
| | atccacgctgttttgacctccatagaagacaccgggaccgatccagcctccgcgga | |
| | ttcgaatcccggccgggaacggtgcattggaacgcggattccccgtgccaagagtg | |
| | acgtaagtaccgcctatagagtctataggcccacaaaaaatgctttcttcttttaa | |
| | tatacttttttgtttatcttatttctaatactttccctaatctctttctttcaggg | |
| | caataatgatacaatgtatcatgcctctttgcaccattctaaagaataacagtgat | |
| | aatttctgggttaaggcaatagcaatatttctgcatataaatatttctgcatataa | |
| | attgtaactgatgtaagaggtttcatattgctaatagcagctacaatccagctacc | |
| | attctgcttttattttatggttgggataaggctggattattctgagtccaagctag | |
| | gcccttttgctaatcatgttcatacctcttatcttcctcccacagctcctgggcaa | |
| | cgtgctggtctgtgtgctggcccatcactttggcaaagaattgggattcgaaccgg | |
| | tgccgccaccATGGAATTCTCTAGCCCATCTAGAGAGGAATGTCCTAAGCCTCTGT | |
| | CAAGAGTGTCCATCATGGCCGGCAGCCTGACAGGCCTGCTGCTGCTGCAGGCCGTG | |
| | TCCTGGGCCAGTGGAGCCCGGCCCTGCATCCCTAAGTCCTTCGGCTATTCTAGCGT | |
| | GGTCTGCGTGTGTAATGCCACTTACTGCGACAGCTTCGACCCTCCTACCTTCCCCG | |
| | CCCTTGGAACATTCAGCAGATACGAGAGCACCAGAAGCGGCAGAAGAATGGAACTG | |
| | AGCATGGGCCCAATCCAGGCCAACCACACCGGCACCGGCCTGCTGCTGACACTGCA | |
| | ACCTGAGCAGAAGTTCCAGAAGGTGAAGGGATTTGGAGGCGCCATGACCGACGCTG | |
| | CTGCTCTGAACATCCTGGCCCTCTCCCCACCTGCTCAGAACCTGCTGCTTAAAAGC | |
| | TACTTCAGCGAGGAAGGCATCGGCTATAACATCATCAGAGTGCCCATGGCCAGCTG | |
| | CGACTTCAGCATCAGAACATACACCTACGCCGATACACCTGATGACTTCCAACTGC | |
| | ACAACTTCAGCCTGCCTGAAGAGGACACAAAGCTGAAAATCCCCCTGATCCACCGG | |
| | GCCCTGCAGCTGGCCCAGAGACCTGTGAGCCTGCTGGCCTCTCCTTGGACAAGCCC | |
| | CACCTGGCTGAAGACCAATGGAGCTGTGAACGGCAAGGGCAGCCTGAAGGGCCAGC | |
| | CCGGCGACATCTACCACCAAACCTGGGCTCGCTACTTCGTGAAATTCCTGGACGCC | |
| | TACGCTGAGCATAAGCTGCAATTTTGGGCCGTTACAGCCGAGAACGAGCCTTCTGC | |
| | CGGCCTGCTGTCTGGATATCCTTTCCAGTGCCTGGGCTTCACCCCTGAGCACCAGA | |
| | GAGACTTTATCGCCAGAGATCTGGGGCCTACCCTGGCTAACAGCACACACCACAAC | |
| | GTGCGGCTGCTGATGCTGGACGATCAGAGGCTGCTGCTCCCCCACTGGGCCAAGGT | |
| | GGTGCTGACAGATCCGGAGGCCGCCAAATACGTGCACGGCATCGCCGTCCACTGGT | |
| | ACCTGGATTTCCTGGCCCCTGCCAAGGCCACCCTGGGCGAGACACATAGACTGTTT | |
| | CCTAATACCATGCTGTTCGCCAGCGAGGCCTGCGTGGGCAGCAAGTTCTGGGAACA | |
| | GAGCGTGCGGCTGGGCAGCTGGGACAGAGGAATGCAGTACAGCCACAGCATCATTA | |
| | CCAACCTGCTGTACCACGTGGTGGGCTGGACCGACTGGAACCTGGCCCTGAACCCC | |
| | GAAGGCGGCCCCAACTGGGTGCGGAACTTCGTGGACTCTCCTATCATCGTGGATAT | |
| | TACCAAGGATACCTTTTACAAGCAGCCTATGTTCTACCACCTGGGCCACTTCAGCA | |
| | AGTTCATCCCTGAGGGCTCTCAGCGGGTGGGCCTGGTGGCCTCTCAGAAAAACGAC | |
| | CTGGATGCCGTTGCCCTGATGCACCCCGACGGCAGCGCCGTGGTGGTCGTCCTGAA | |
| | TAGAAGCTCCAAGGACGTGCCTCTGACCATCAAGGACCCCGCTGTGGGATTTCTGG | |
| | AAACCATCAGCCCTGGCTACAGCATCCACACCTACCTGTGGCGGCGGCAGtagtaa | |
| | ctcgaggacggggtgaactacgcctgaggatccgatctttttccctctgccaaaaa | |
| | ttatggggacatcatgaagccccttgagcatctgacttctggctaataaaggaaat | |
| | ttattttcattgcaatagtgtgttggaattttttgtgtctctcactcggcctaggt | |
| | agataagtagcatggcgggttaatcattaactacaaggaacccctagtgatggagt | |
| | tggccactccctctctgcgcgctcgctcgctcactgaggccgggcgaccaaaggtc | |
| | gcccgacgcccgggctttgcccgggcggcctcagtgagcgagcgagcgcgcag | |
| GBA_VG18 | ctgcgcgctcgctcgctcactgaggccgcccgggcaaagcccgggcgtcgggcgac | 1813 |
| | ctttggtcgcccggcctcagtgagcgagcgagcgcgcagagagggagtggccaact | |
| | ccatcactaggggttccttgtagttaatgattaacccgccatgctacttatctacc | |
| | agggtaatggggatcctctagaactatagctagtcgacataacgcgtgcatgcgtg | |
| | aggctccggtgcccgtcagtgggcagagcgcacatcgcccacagtccccgagaagt | |
| | tggggggaggggtcggcaattgaaccggtgcctagagaaggtggcgcggggtaaac | |
| | tgggaaagtgatgtcgtgtactggctccgcctttttcccgagggtgggggagaacc | |
| | gtatataagtgcagtagtcgccgtgaacgttctttttcgcaacgggtttgccgcca | |
| | gaacacaggtaagtgccgtgtgtggttcccgcgggcctggcctctttacgggttat | |
| | ggcccttgcgtgccttgaattacttccacctggctgcagtacgtgattcttgatcc | |
| | cgagcttcgggttggaagtgggtgggagagttcgaggccttgcgcttaaggagccc | |
| | cttcgcctcgtgcttgagttgaggcctggcctgggcgctggggccgccgcgtgcga | |
| | atctggtggcaccttcgcgcctgtctcgctgctttcgataagtctctagccattta | |
| | aaatttttgatgacctgctgcgacgctttttttctggcaagatagtcttgtaaatg | |
| | cgggccaagatctgcacactggtatttcggtttttggggccgcgggcggcgacggg | |
| | gcccgtgcgtcccagcgcacatgttcggcgaggcggggcctgcgagcgcggccacc | |
| | gagaatcggacgggggtagtctcaagctggccggcctgctctggtgcctggcctcg | |
| | cgccgccgtgtatcgccccgccctgggcggcaaggctggcccggtcggcaccagtt | |
| | gcgtgagcggaaagatggccgcttcccggccctgctgcagggagctcaaaatggag | |
| | gacgcggcgctcgggagagcgggcgggtgagtcacccacacaaaggaaaagggcct | |
| | ttccgtcctcagccgtcgcttcatgtgactccacggagtaccgggcgccgtccagg | |
| | cacctcgattagttctcgagcttttggagtacgtcgtctttaggttggggggaggg | |
| | gttttatgcgatggagtttccccacactgagtgggtggagactgaagttaggccag | |
| | cttggcacttgatgtaattctccttggaatttgccctttttgagtttggatcttgg | |
| | ttcattctcaagcctcagacagtggttcaaagtttttttcttccatttcaggtgtc | |
| | gtgagggattcgaaccggtgccgccaccATGGAATTCTCTAGCCCATCTAGAGAGG | |
| | AATGTCCTAAGCCTCTGTCAAGAGTGTCCATCATGGCCGGCAGCCTGACAGGCCTG | |
| | CTGCTGCTGCAGGCCGTGTCCTGGGCCAGTGGAGCCCGGCCCTGCATCCCTAAGTC | |
| | CTTCGGCTATTCTAGCGTGGTCTGCGTGTGTAATGCCACTTACTGCGACAGCTTCG | |
| | ACCCTCCTACCTTCCCCGCCCTTGGAACATTCAGCAGATACGAGAGCACCAGAAGC | |
| | GGCAGAAGAATGGAACTGAGCATGGGCCCAATCCAGGCCAACCACACCGGCACCGG | |
| | CCTGCTGCTGACACTGCAACCTGAGCAGAAGTTCCAGAAGGTGAAGGGATTTGGAG | |
| | GCGCCATGACCGACGCTGCTGCTCTGAACATCCTGGCCCTCTCCCCACCTGCTCAG | |
| | AACCTGCTGCTTAAAAGCTACTTCAGCGAGGAAGGCATCGGCTATAACATCATCAG | |
| | AGTGCCCATGGCCAGCTGCGACTTCAGCATCAGAACATACACCTACGCCGATACAC | |
| | CTGATGACTTCCAACTGCACAACTTCAGCCTGCCTGAAGAGGACACAAAGCTGAAA | |
| | ATCCCCCTGATCCACCGGGCCCTGCAGCTGGCCCAGAGACCTGTGAGCCTGCTGGC | |
| | CTCTCCTTGGACAAGCCCCACCTGGCTGAAGACCAATGGAGCTGTGAACGGCAAGG | |
| | GCAGCCTGAAGGGCCAGCCCGGCGACATCTACCACCAAACCTGGGCTCGCTACTTC | |
| | GTGAAATTCCTGGACGCCTACGCTGAGCATAAGCTGCAATTTTGGGCCGTTACAGC | |
| | CGAGAACGAGCCTTCTGCCGGCCTGCTGTCTGGATATCCTTTCCAGTGCCTGGGCT | |
| | TCACCCCTGAGCACCAGAGAGACTTTATCGCCAGAGATCTGGGGCCTACCCTGGCT | |
| | AACAGCACACACCACAACGTGCGGCTGCTGATGCTGGACGATCAGAGGCTGCTGCT | |
| | CCCCCACTGGGCCAAGGTGGTGCTGACAGATCCGGAGGCCGCCAAATACGTGCACG | |
| | GCATCGCCGTCCACTGGTACCTGGATTTCCTGGCCCCTGCCAAGGCCACCCTGGGC | |
| | GAGACACATAGACTGTTTCCTAATACCATGCTGTTCGCCAGCGAGGCCTGCGTGGG | |
| | CAGCAAGTTCTGGGAACAGAGCGTGCGGCTGGGCAGCTGGGACAGAGGAATGCAGT | |
| | ACAGCCACAGCATCATTACCAACCTGCTGTACCACGTGGTGGGCTGGACCGACTGG | |
| | AACCTGGCCCTGAACCCCGAAGGCGGCCCCAACTGGGTGCGGAACTTCGTGGACTC | |
| | TCCTATCATCGTGGATATTACCAAGGATACCTTTTACAAGCAGCCTATGTTCTACC | |
| | ACCTGGGCCACTTCAGCAAGTTCATCCCTGAGGGCTCTCAGCGGGTGGGCCTGGTG | |
| | GCCTCTCAGAAAAACGACCTGGATGCCGTTGCCCTGATGCACCCCGACGGCAGCGC | |
| | CGTGGTGGTCGTCCTGAATAGAAGCTCCAAGGACGTGCCTCTGACCATCAAGGACC | |
| | CCGCTGTGGGATTTCTGGAAACCATCAGCCCTGGCTACAGCATCCACACCTACCTG | |
| | TGGCGGCGGCAGtagtaactcgaggacggggtgaactacgcctgaggatccgatct | |
| | ttttccctctgccaaaaattatggggacatcatgaagccccttgagcatctgactt | |
| | ctggctaataaaggaaatttattttcattgcaatagtgtgttggaattttttgtgt | |
| | ctctcactcggcctaggtagataagtagcatggcgggttaatcattaactacaagg | |
| | aacccctagtgatggagttggccactccctctctgcgcgctcgctcgctcactgag | |
| | gccgggcgaccaaaggtcgcccgacgcccgggctttgcccgggcggcctcagtgag | |
| | cgagcgagcgcgcag | |
| GBA_VG27 | ctgcgcgctcgctcgctcactgaggccgcccgggcaaagcccgggcgtcgggcgac | 1822 |
| | ctttggtcgcccggcctcagtgagcgagcgagcgcgcagagagggagtggccaact | |
| | ccatcactaggggttcctTGTAGTTAATGATTAACCCGCCATGCTACTTATCTACC | |
| | AGGGTAATGGGGATCCTCTAGAACTATAGCTAGTCGACATTGATTATTGACTAGTT | |
| | ATTAATAGTAATCAATTACGGGGTCATTAGTTCATAGCCCATATATGGAGTTCCGC | |
| | GTTACATAACTTACGGTAAATGGCCCGCCTGGCTGACCGCCCAACGACCCCCGCCC | |
| | ATTGACGTCAATAATGACGTATGTTCCCATAGTAACGCCAATAGGGACTTTCCATT | |
| | GACGTCAATGGGTGGAGTATTTACGGTAAACTGCCCACTTGGCAGTACATCAAGTG | |
| | TATCATATGCCAAGTACGCCCCCTATTGACGTCAATGACGGTAAATGGCCCGCCTG | |
| | GCATTATGCCCAGTACATGACCTTATGGGACTTTCCTACTTGGCAGTACATCTACG | |
| | TATTAGTCATCGCTATTACCATGTCGAGGccacgttctgcttcactctccccatct | |
| | cccccccctccccacccccaattttgtatttatttattttttaattattttgtgca | |
| | gcgatgggggcggggggggggggcgcgcgccaggcggggcggggcggggcgagggg | |
| | cggggcggggcgaggcggagaggtgcggcggcagccaatcagagcggcgcgctccg | |
| | aaagtttccttttatggcgaggcggcggcggcggcggccctataaaaagcgaagcg | |
| | cgcggcgggCGGGAGCAAGCTTCGTTTAGTGAACCGtcagatcgcctggagacgcc | |
| | atccacgctgttttgacctccatagaagacaccgggaccgatccagcctccgcgga | |
| | ttcgaatcccggccgggaacggtgcattggaacgcggattccccgtgccaagagtg | |
| | acgtaagtaccgcctatagagtctataggcccacaaaaaatgctttcttcttttaa | |
| | tatacttttttgtttatcttatttctaatactttccctaatctctttctttcaggg | |
| | caataatgatacaatgtatcatgcctctttgcaccattctaaagaataacagtgat | |
| | aatttctgggttaaggcaatagcaatatttctgcatataaatatttctgcatataa | |
| | attgtaactgatgtaagaggtttcatattgctaatagcagctacaatccagctacc | |
| | attctgcttttattttatggttgggataaggctggattattctgagtccaagctag | |
| | gcccttttgctaatcatgttcatacctcttatcttcctcccacagctcctgggcaa | |
| | cgtgctggtctgtgtgctggcccatcactttggcaaagaattGGGATTCGAACCGG | |
| | TGCCGCCACCATGGAATTCTCTAGCCCATCTAGAGAGGAATGTCCTAAGCCTCTGT | |
| | CAAGAGTGTCCATCATGGCCGGCAGCCTGACAGGCCTGCTGCTGCTGCAGGCCGTG | |
| | TCCTGGGCCAGTGGAGCCCGGCCCTGCATCCCTAAGTCCTTCGGCTATTCTAGCGT | |
| | GGTCTGCGTGTGTAATGCCACTTACTGCGACAGCTTCGACCCTCCTACCTTCCCCG | |
| | CCCTTGGAACATTCAGCAGATACGAGAGCACCAGAAGCGGCAGAAGAATGGAACTG | |
| | AGCATGGGCCCAATCCAGGCCAACCACACCGGCACCGGCCTGCTGCTGACACTGCA | |
| | ACCTGAGCAGAAGTTCCAGAAGGTGAAGGGATTTGGAGGCGCCATGACCGACGCTG | |
| | CTGCTCTGAACATCCTGGCCCTCTCCCCACCTGCTCAGAACCTGCTGCTTAAAAGC | |
| | TACTTCAGCGAGGAAGGCATCGGCTATAACATCATCAGAGTGCCCATGGCCAGCTG | |
| | CGACTTCAGCATCAGAACATACACCTACGCCGATACACCTGATGACTTCCAACTGC | |
| | ACAACTTCAGCCTGCCTGAAGAGGACACAAAGCTGAAAATCCCCCTGATCCACCGG | |
| | GCCCTGCAGCTGGCCCAGAGACCTGTGAGCCTGCTGGCCTCTCCTTGGACAAGCCC | |
| | CACCTGGCTGAAGACCAATGGAGCTGTGAACGGCAAGGGCAGCCTGAAGGGCCAGC | |
| | CCGGCGACATCTACCACCAAACCTGGGCTCGCTACTTCGTGAAATTCCTGGACGCC | |
| | TACGCTGAGCATAAGCTGCAATTTTGGGCCGTTACAGCCGAGAACGAGCCTTCTGC | |
| | CGGCCTGCTGTCTGGATATCCTTTCCAGTGCCTGGGCTTCACCCCTGAGCACCAGA | |
| | GAGACTTTATCGCCAGAGATCTGGGGCCTACCCTGGCTAACAGCACACACCACAAC | |
| | GTGCGGCTGCTGATGCTGGACGATCAGAGGCTGCTGCTCCCCCACTGGGCCAAGGT | |
| | GGTGCTGACAGATCCGGAGGCCGCCAAATACGTGCACGGCATCGCCGTCCACTGGT | |
| | ACCTGGATTTCCTGGCCCCTGCCAAGGCCACCCTGGGCGAGACACATAGACTGTTT | |
| | CCTAATACCATGCTGTTCGCCAGCGAGGCCTGCGTGGGCAGCAAGTTCTGGGAACA | |
| | GAGCGTGCGGCTGGGCAGCTGGGACAGAGGAATGCAGTACAGCCACAGCATCATTA | |
| | CCAACCTGCTGTACCACGTGGTGGGCTGGACCGACTGGAACCTGGCCCTGAACCCC | |
| | GAAGGCGGCCCCAACTGGGTGCGGAACTTCGTGGACTCTCCTATCATCGTGGATAT | |
| | TACCAAGGATACCTTTTACAAGCAGCCTATGTTCTACCACCTGGGCCACTTCAGCA | |
| | AGTTCATCCCTGAGGGCTCTCAGCGGGTGGGCCTGGTGGCCTCTCAGAAAAACGAC | |
| | CTGGATGCCGTTGCCCTGATGCACCCCGACGGCAGCGCCGTGGTGGTCGTCCTGAA | |
| | TAGAAGCTCCAAGGACGTGCCTCTGACCATCAAGGACCCCGCTGTGGGATTTCTGG | |
| | AAACCATCAGCCCTGGCTACAGCATCCACACCTACCTGTGGCGGCGGCAGAgaaag | |
| | aggcgagagggcagaggaagtcttctaacatgcggtgacgtggaggagaatcccgg | |
| | ccctATGTACGCCCTCTTCCTCCTGGCCAGCCTCCTGGGCGCGGCTCTAGCCgtga | |
| | aagagatgcccatgcagactctggtccccgccaaagtggcctccaagaatgtcatc | |
| | cctgccctggaactggtggagcccattaagaagcacgaggtcccagcaaagtctga | |
| | tgtttactgtgaggtgtgtgaattcctggtgaaggaggtgaccaagctgattgaca | |
| | acaacaagactgagaaagaaatactcgacgcttttgacaaaatgtgctcgaagctg | |
| | ccgaagtccctgtcggaagagtgccaggaggtggtggacacgtacggcagctccat | |
| | cctgtccatcctgctggaggaggtcagccctgagctggtgtgcagcatgctgcacc | |
| | tctgctctggcTAGTAACTCGAGGACGGGGTGAACTACGCCTGAGGATCCgatctt | |
| | tttccctctgccaaaaattatggggacatcatgaagccccttgagcatctgacttc | |
| | tggctaataaaggaaatttattttcattgcaatagtgtgttggaattttttgtgtc | |
| | tctcactcgGCCTAGGTAGATAAGTAGCATGGCGGGTTAATCATTAACTACAagga | |
| | acccctagtgatggagttggccactccctctctgcgcgctcgctcgctcactgagg | |
| | ccgggcgaccaaaggtcgcccgacgcccgggctttgcccgggcggcctcagtgagc | |
| | gagcgagcgcgcag | |
| GBA_VG29 | ctgcgcgctcgctcgctcactgaggccgcccgggcaaagcccgggcgtcgggcgac | 1824 |
| | ctttggtcgcccggcctcagtgagcgagcgagcgcgcagagagggagtggccaact | |
| | ccatcactaggggttcctTGTAGTTAATGATTAACCCGCCATGCTACTTATCTACC | |
| | AGGGTAATGGGGATCCTCTAGAACTATAGCTAGTCGACATTGATTATTGACTAGTT | |
| | ATTAATAGTAATCAATTACGGGGTCATTAGTTCATAGCCCATATATGGAGTTCCGC | |
| | GTTACATAACTTACGGTAAATGGCCCGCCTGGCTGACCGCCCAACGACCCCCGCCC | |
| | ATTGACGTCAATAATGACGTATGTTCCCATAGTAACGCCAATAGGGACTTTCCATT | |
| | GACGTCAATGGGTGGAGTATTTACGGTAAACTGCCCACTTGGCAGTACATCAAGTG | |
| | TATCATATGCCAAGTACGCCCCCTATTGACGTCAATGACGGTAAATGGCCCGCCTG | |
| | GCATTATGCCCAGTACATGACCTTATGGGACTTTCCTACTTGGCAGTACATCTACG | |
| | TATTAGTCATCGCTATTACCATGTCGAGGccacgttctgcttcactctccccatct | |
| | cccccccctccccacccccaattttgtatttatttattttttaattattttgtgca | |
| | gcgatgggggcggggggggggggcgcgcgccaggcggggcggggcggggcgagggg | |
| | cggggcggggcgaggcggagaggtgcggcggcagccaatcagagcggcgcgctccg | |
| | aaagtttccttttatggcgaggcggcggcggcggcggccctataaaaagcgaagcg | |
| | cgcggcgggCGGGAGCAAGCTTCGTTTAGTGAACCGtcagatcgcctggagacgcc | |
| | atccacgctgttttgacctccatagaagacaccgggaccgatccagcctccgcgga | |
| | ttcgaatcccggccgggaacggtgcattggaacgcggattccccgtgccaagagtg | |
| | acgtaagtaccgcctatagagtctataggcccacaaaaaatgctttcttcttttaa | |
| | tatacttttttgtttatcttatttctaatactttccctaatctctttctttcaggg | |
| | caataatgatacaatgtatcatgcctctttgcaccattctaaagaataacagtgat | |
| | aatttctgggttaaggcaatagcaatatttctgcatataaatatttctgcatataa | |
| | attgtaactgatgtaagaggtttcatattgctaatagcagctacaatccagctacc | |
| | attctgcttttattttatggttgggataaggctggattattctgagtccaagctag | |
| | gcccttttgctaatcatgttcatacctcttatcttcctcccacagctcctgggcaa | |
| | cgtgctggtctgtgtgctggcccatcactttggcaaagaattGGGATTCGAACCGG | |
| | TGCCGCCACCATGGAATTCTCTAGCCCATCTAGAGAGGAATGTCCTAAGCCTCTGT | |
| | CAAGAGTGTCCATCATGGCCGGCAGCCTGACAGGCCTGCTGCTGCTGCAGGCCGTG | |
| | TCCTGGGCCAGTGGAatgaaggagaccgctgctgcaaagttcgagagacagcatat | |
| | ggatagctccacaagcgccgcaGCCCGGCCCTGCATCCCTAAGTCCTTCGGCTATT | |
| | CTAGCGTGGTCTGCGTGTGTAATGCCACTTACTGCGACAGCTTCGACCCTCCTACC | |
| | TTCCCCGCCCTTGGAACATTCAGCAGATACGAGAGCACCAGAAGCGGCAGAAGAAT | |
| | GGAACTGAGCATGGGCCCAATCCAGGCCAACCACACCGGCACCGGCCTGCTGCTGA | |
| | CACTGCAACCTGAGCAGAAGTTCCAGAAGGTGAAGGGATTTGGAGGCGCCATGACC | |
| | GACGCTGCTGCTCTGAACATCCTGGCCCTCTCCCCACCTGCTCAGAACCTGCTGCT | |
| | TAAAAGCTACTTCAGCGAGGAAGGCATCGGCTATAACATCATCAGAGTGCCCATGG | |
| | CCAGCTGCGACTTCAGCATCAGAACATACACCTACGCCGATACACCTGATGACTTC | |
| | CAACTGCACAACTTCAGCCTGCCTGAAGAGGACACAAAGCTGAAAATCCCCCTGAT | |
| | CCACCGGGCCCTGCAGCTGGCCCAGAGACCTGTGAGCCTGCTGGCCTCTCCTTGGA | |
| | CAAGCCCCACCTGGCTGAAGACCAATGGAGCTGTGAACGGCAAGGGCAGCCTGAAG | |
| | GGCCAGCCCGGCGACATCTACCACCAAACCTGGGCTCGCTACTTCGTGAAATTCCT | |
| | GGACGCCTACGCTGAGCATAAGCTGCAATTTTGGGCCGTTACAGCCGAGAACGAGC | |
| | CTTCTGCCGGCCTGCTGTCTGGATATCCTTTCCAGTGCCTGGGCTTCACCCCTGAG | |
| | CACCAGAGAGACTTTATCGCCAGAGATCTGGGGCCTACCCTGGCTAACAGCACACA | |
| | CCACAACGTGCGGCTGCTGATGCTGGACGATCAGAGGCTGCTGCTCCCCCACTGGG | |
| | CCAAGGTGGTGCTGACAGATCCGGAGGCCGCCAAATACGTGCACGGCATCGCCGTC | |
| | CACTGGTACCTGGATTTCCTGGCCCCTGCCAAGGCCACCCTGGGCGAGACACATAG | |
| | ACTGTTTCCTAATACCATGCTGTTCGCCAGCGAGGCCTGCGTGGGCAGCAAGTTCT | |
| | GGGAACAGAGCGTGCGGCTGGGCAGCTGGGACAGAGGAATGCAGTACAGCCACAGC | |
| | ATCATTACCAACCTGCTGTACCACGTGGTGGGCTGGACCGACTGGAACCTGGCCCT | |
| | GAACCCCGAAGGCGGCCCCAACTGGGTGCGGAACTTCGTGGACTCTCCTATCATCG | |
| | TGGATATTACCAAGGATACCTTTTACAAGCAGCCTATGTTCTACCACCTGGGCCAC | |
| | TTCAGCAAGTTCATCCCTGAGGGCTCTCAGCGGGTGGGCCTGGTGGCCTCTCAGAA | |
| | AAACGACCTGGATGCCGTTGCCCTGATGCACCCCGACGGCAGCGCCGTGGTGGTCG | |
| | TCCTGAATAGAAGCTCCAAGGACGTGCCTCTGACCATCAAGGACCCCGCTGTGGGA | |
| | TTTCTGGAAACCATCAGCCCTGGCTACAGCATCCACACCTACCTGTGGCGGCGGCA | |
| | GTAGTAACTCGAGGACGGGGTGAACTACGCCTGAGGATCCgatctttttccctctg | |
| | ccaaaaattatggggacatcatgaagccccttgagcatctgacttctggctaataa | |
| | aggaaatttattttcattgcaatagtgtgttggaattttttgtgtctctcactcgG | |
| | CCTAGGTAGATAAGTAGCATGGCGGGTTAATCATTAACTACAaggaacccctagtg | |
| | atggagttggccactccctctctgcgcgctcgctcgctcactgaggccgggcgacc | |
| | aaaggtcgcccgacgcccgggctttgcccgggcggcctcagtgagcgagcgagcgc | |
| | gcag | |
| GBA_VG32 | ctgcgcgctcgctcgctcactgaggccgcccgggcaaagcccgggcgtcgggcgac | 1827 |
| | ctttggtcgcccggcctcagtgagcgagcgagcgcgcagagagggagtggccaact | |
| | ccatcactaggggttcctTGTAGTTAATGATTAACCCGCCATGCTACTTATCTACC | |
| | AGGGTAATGGGGATCCTCTAGAACTATAGCTAGTCGACATTGATTATTGACTAGTT | |
| | ATTAATAGTAATCAATTACGGGGTCATTAGTTCATAGCCCATATATGGAGTTCCGC | |
| | GTTACATAACTTACGGTAAATGGCCCGCCTGGCTGACCGCCCAACGACCCCCGCCC | |
| | ATTGACGTCAATAATGACGTATGTTCCCATAGTAACGCCAATAGGGACTTTCCATT | |
| | GACGTCAATGGGTGGAGTATTTACGGTAAACTGCCCACTTGGCAGTACATCAAGTG | |
| | TATCATATGCCAAGTACGCCCCCTATTGACGTCAATGACGGTAAATGGCCCGCCTG | |
| | GCATTATGCCCAGTACATGACCTTATGGGACTTTCCTACTTGGCAGTACATCTACG | |
| | TATTAGTCATCGCTATTACCATGTCGAGGccacgttctgcttcactctccccatct | |
| | cccccccctccccacccccaattttgtatttatttattttttaattattttgtgca | |
| | gcgatgggggcggggggggggggcgcgcgccaggcggggcggggcggggcgagggg | |
| | cggggcggggcgaggcggagaggtgcggcggcagccaatcagagcggcgcgctccg | |
| | aaagtttccttttatggcgaggcggcggcggcggcggccctataaaaagcgaagcg | |
| | cgcggcgggCGGGAGCAAGCTTCGTTTAGTGAACCGtcagatcgcctggagacgcc | |
| | atccacgctgttttgacctccatagaagacaccgggaccgatccagcctccgcgga | |
| | ttcgaatcccggccgggaacggtgcattggaacgcggattccccgtgccaagagtg | |
| | acgtaagtaccgcctatagagtctataggcccacaaaaaatgctttcttcttttaa | |
| | tatacttttttgtttatcttatttctaatactttccctaatctctttctttcaggg | |
| | caataatgatacaatgtatcatgcctctttgcaccattctaaagaataacagtgat | |
| | aatttctgggttaaggcaatagcaatatttctgcatataaatatttctgcatataa | |
| | attgtaactgatgtaagaggtttcatattgctaatagcagctacaatccagctacc | |
| | attctgcttttattttatggttgggataaggctggattattctgagtccaagctag | |
| | gcccttttgctaatcatgttcatacctcttatcttcctcccacagctcctgggcaa | |
| | cgtgctggtctgtgtgctggcccatcactttggcaaagaattGGGATTCGAACCGG | |
| | TGCCGCCACCATGGAATTCTCTAGCCCATCTAGAGAGGAATGTCCTAAGCCTCTGT | |
| | CAAGAGTGTCCATCATGGCCGGCAGCCTGACAGGCCTGCTGCTGCTGCAGGCCGTG | |
| | TCCTGGGCCAGTGGAGCCCGGCCCTGCATCCCTAAGTCCTTCGGCTATTCTAGCGT | |
| | GGTCTGCGTGTGTAATGCCACTTACTGCGACAGCTTCGACCCTCCTACCTTCCCCG | |
| | CCCTTGGAACATTCAGCAGATACGAGAGCACCAGAAGCGGCAGAAGAATGGAACTG | |
| | AGCATGGGCCCAATCCAGGCCAACCACACCGGCACCGGCCTGCTGCTGACACTGCA | |
| | ACCTGAGCAGAAGTTCCAGAAGGTGAAGGGATTTGGAGGCGCCATGACCGACGCTG | |
| | CTGCTCTGAACATCCTGGCCCTCTCCCCACCTGCTCAGAACCTGCTGCTTAAAAGC | |
| | TACTTCAGCGAGGAAGGCATCGGCTATAACATCATCAGAGTGCCCATGGCCAGCTG | |
| | CGACTTCAGCATCAGAACATACACCTACGCCGATACACCTGATGACTTCCAACTGC | |
| | ACAACTTCAGCCTGCCTGAAGAGGACACAAAGCTGAAAATCCCCCTGATCCACCGG | |
| | GCCCTGCAGCTGGCCCAGAGACCTGTGAGCCTGCTGGCCTCTCCTTGGACAAGCCC | |
| | CACCTGGCTGAAGACCAATGGAGCTGTGAACGGCAAGGGCAGCCTGAAGGGCCAGC | |
| | CCGGCGACATCTACCACCAAACCTGGGCTCGCTACTTCGTGAAATTCCTGGACGCC | |
| | TACGCTGAGCATAAGCTGCAATTTTGGGCCGTTACAGCCGAGAACGAGCCTTCTGC | |
| | CGGCCTGCTGTCTGGATATCCTTTCCAGTGCCTGGGCTTCACCCCTGAGCACCAGA | |
| | GAGACTTTATCGCCAGAGATCTGGGGCCTACCCTGGCTAACAGCACACACCACAAC | |
| | GTGCGGCTGCTGATGCTGGACGATCAGAGGCTGCTGCTCCCCCACTGGGCCAAGGT | |
| | GGTGCTGACAGATCCGGAGGCCGCCAAATACGTGCACGGCATCGCCGTCCACTGGT | |
| | ACCTGGATTTCCTGGCCCCTGCCAAGGCCACCCTGGGCGAGACACATAGACTGTTT | |
| | CCTAATACCATGCTGTTCGCCAGCGAGGCCTGCGTGGGCAGCAAGTTCTGGGAACA | |
| | GAGCGTGCGGCTGGGCAGCTGGGACAGAGGAATGCAGTACAGCCACAGCATCATTA | |
| | CCAACCTGCTGTACCACGTGGTGGGCTGGACCGACTGGAACCTGGCCCTGAACCCC | |
| | GAAGGCGGCCCCAACTGGGTGCGGAACTTCGTGGACTCTCCTATCATCGTGGATAT | |
| | TACCAAGGATACCTTTTACAAGCAGCCTATGTTCTACCACCTGGGCCACTTCAGCA | |
| | AGTTCATCCCTGAGGGCTCTCAGCGGGTGGGCCTGGTGGCCTCTCAGAAAAACGAC | |
| | CTGGATGCCGTTGCCCTGATGCACCCCGACGGCAGCGCCGTGGTGGTCGTCCTGAA | |
| | TAGAAGCTCCAAGGACGTGCCTCTGACCATCAAGGACCCCGCTGTGGGATTTCTGG | |
| | AAACCATCAGCCCTGGCTACAGCATCCACACCTACCTGTGGCGGCGGCAGGGAGGG | |
| | GGGGGTTCGGGTGGCGGCGGAAGTGGGGGCGGTGGTTCTtatggcaggaaaaagcg | |
| | gaggcaaaggcgccgccccccccagTAGTAACTCGAGGACGGGGTGAACTACGCCT | |
| | GAGGATCCgatctttttccctctgccaaaaattatggggacatcatgaagcccctt | |
| | gagcatctgacttctggctaataaaggaaatttattttcattgcaatagtgtgttg | |
| | gaattttttgtgtctctcactcgGCCTAGGTAGATAAGTAGCATGGCGGGTTAATC | |
| | ATTAACTACAaggaacccctagtgatggagttggccactccctctctgcgcgctcg | |
| | ctcgctcactgaggccgggcgaccaaaggtcgcccgacgcccgggctttgcccggg | |
| | cggcctcagtgagcgagcgagcgcgcag | |
| GBA_VG33 | ctgcgcgctcgctcgctcactgaggccgcccgggcaaagcccgggcgtcgggcgac | 1828 |
| | ctttggtcgcccggcctcagtgagcgagcgagcgcgcagagagggagtggccaact | |
| | ccatcactaggggttcctTGTAGTTAATGATTAACCCGCCATGCTACTTATCTACC | |
| | AGGGTAATGGGGATCCTCTAGAACTATAGCTAGTCGACATTGATTATTGACTAGTT | |
| | ATTAATAGTAATCAATTACGGGGTCATTAGTTCATAGCCCATATATGGAGTTCCGC | |
| | GTTACATAACTTACGGTAAATGGCCCGCCTGGCTGACCGCCCAACGACCCCCGCCC | |
| | ATTGACGTCAATAATGACGTATGTTCCCATAGTAACGCCAATAGGGACTTTCCATT | |
| | GACGTCAATGGGTGGAGTATTTACGGTAAACTGCCCACTTGGCAGTACATCAAGTG | |
| | TATCATATGCCAAGTACGCCCCCTATTGACGTCAATGACGGTAAATGGCCCGCCTG | |
| | GCATTATGCCCAGTACATGACCTTATGGGACTTTCCTACTTGGCAGTACATCTACG | |
| | TATTAGTCATCGCTATTACCATGTCGAGGccacgttctgcttcactctccccatct | |
| | cccccccctccccacccccaattttgtatttatttattttttaattattttgtgca | |
| | gcgatgggggcggggggggggggcgcgcgccaggcggggcggggcggggcgagggg | |
| | cggggcggggcgaggcggagaggtgcggcggcagccaatcagagcggcgcgctccg | |
| | aaagtttccttttatggcgaggcggcggcggcggcggccctataaaaagcgaagcg | |
| | cgcggcgggCGGGAGCAAGCTTCGTTTAGTGAACCGtcagatcgcctggagacgcc | |
| | atccacgctgttttgacctccatagaagacaccgggaccgatccagcctccgcgga | |
| | ttcgaatcccggccgggaacggtgcattggaacgcggattccccgtgccaagagtg | |
| | acgtaagtaccgcctatagagtctataggcccacaaaaaatgctttcttcttttaa | |
| | tatacttttttgtttatcttatttctaatactttccctaatctctttctttcaggg | |
| | caataatgatacaatgtatcatgcctctttgcaccattctaaagaataacagtgat | |
| | aatttctgggttaaggcaatagcaatatttctgcatataaatatttctgcatataa | |
| | attgtaactgatgtaagaggtttcatattgctaatagcagctacaatccagctacc | |
| | attctgcttttattttatggttgggataaggctggattattctgagtccaagctag | |
| | gcccttttgctaatcatgttcatacctcttatcttcctcccacagctcctgggcaa | |
| | cgtgctggtctgtgtgctggcccatcactttggcaaagaattGGGATTCGAACCGG | |
| | TGCCGCCACCATGGAATTCTCTAGCCCATCTAGAGAGGAATGTCCTAAGCCTCTGT | |
| | CAAGAGTGTCCATCATGGCCGGCAGCCTGACAGGCCTGCTGCTGCTGCAGGCCGTG | |
| | TCCTGGGCCAGTGGAGCCCGGCCCTGCATCCCTAAGTCCTTCGGCTATTCTAGCGT | |
| | GGTCTGCGTGTGTAATGCCACTTACTGCGACAGCTTCGACCCTCCTACCTTCCCCG | |
| | CCCTTGGAACATTCAGCAGATACGAGAGCACCAGAAGCGGCAGAAGAATGGAACTG | |
| | AGCATGGGCCCAATCCAGGCCAACCACACCGGCACCGGCCTGCTGCTGACACTGCA | |
| | ACCTGAGCAGAAGTTCCAGAAGGTGAAGGGATTTGGAGGCGCCATGACCGACGCTG | |
| | CTGCTCTGAACATCCTGGCCCTCTCCCCACCTGCTCAGAACCTGCTGCTTAAAAGC | |
| | TACTTCAGCGAGGAAGGCATCGGCTATAACATCATCAGAGTGCCCATGGCCAGCTG | |
| | CGACTTCAGCATCAGAACATACACCTACGCCGATACACCTGATGACTTCCAACTGC | |
| | ACAACTTCAGCCTGCCTGAAGAGGACACAAAGCTGAAAATCCCCCTGATCCACCGG | |
| | GCCCTGCAGCTGGCCCAGAGACCTGTGAGCCTGCTGGCCTCTCCTTGGACAAGCCC | |
| | CACCTGGCTGAAGACCAATGGAGCTGTGAACGGCAAGGGCAGCCTGAAGGGCCAGC | |
| | CCGGCGACATCTACCACCAAACCTGGGCTCGCTACTTCGTGAAATTCCTGGACGCC | |
| | TACGCTGAGCATAAGCTGCAATTTTGGGCCGTTACAGCCGAGAACGAGCCTTCTGC | |
| | CGGCCTGCTGTCTGGATATCCTTTCCAGTGCCTGGGCTTCACCCCTGAGCACCAGA | |
| | GAGACTTTATCGCCAGAGATCTGGGGCCTACCCTGGCTAACAGCACACACCACAAC | |
| | GTGCGGCTGCTGATGCTGGACGATCAGAGGCTGCTGCTCCCCCACTGGGCCAAGGT | |
| | GGTGCTGACAGATCCGGAGGCCGCCAAATACGTGCACGGCATCGCCGTCCACTGGT | |
| | ACCTGGATTTCCTGGCCCCTGCCAAGGCCACCCTGGGCGAGACACATAGACTGTTT | |
| | CCTAATACCATGCTGTTCGCCAGCGAGGCCTGCGTGGGCAGCAAGTTCTGGGAACA | |
| | GAGCGTGCGGCTGGGCAGCTGGGACAGAGGAATGCAGTACAGCCACAGCATCATTA | |
| | CCAACCTGCTGTACCACGTGGTGGGCTGGACCGACTGGAACCTGGCCCTGAACCCC | |
| | GAAGGCGGCCCCAACTGGGTGCGGAACTTCGTGGACTCTCCTATCATCGTGGATAT | |
| | TACCAAGGATACCTTTTACAAGCAGCCTATGTTCTACCACCTGGGCCACTTCAGCA | |
| | AGTTCATCCCTGAGGGCTCTCAGCGGGTGGGCCTGGTGGCCTCTCAGAAAAACGAC | |
| | CTGGATGCCGTTGCCCTGATGCACCCCGACGGCAGCGCCGTGGTGGTCGTCCTGAA | |
| | TAGAAGCTCCAAGGACGTGCCTCTGACCATCAAGGACCCCGCTGTGGGATTTCTGG | |
| | AAACCATCAGCCCTGGCTACAGCATCCACACCTACCTGTGGCGGCGGCAGTAGTAA | |
| | CCTCGAGGTACCAGGAGCTCTTCTCCTAGTGAATTCTACCAGTGCCATAGATAGTT | |
| | AAGTGAATTCTACCAGTGCCATAGATAGTTAAGTGAATTCTACCAGTGCCATAGAT | |
| | AGTTAAGTGAATTCTACCAGTGCCATACTGCAGTCAGGTCTATACCATCGAGGACG | |
| | GGGTGAACTACGCCTGAGGATCCgatctttttccctctgccaaaaattatggggac | |
| | atcatgaagccccttgagcatctgacttctggctaataaaggaaatttattttcat | |
| | tgcaatagtgtgttggaattttttgtgtctctcactcgGCCTAGGTAGATAAGTAG | |
| | CATGGCGGGTTAATCATTAACTACAaggaacccctagtgatggagttggccactcc | |
| | ctctctgcgcgctcgctcgctcactgaggccgggcgaccaaaggtcgcccgacgcc | |
| | cgggctttgcccgggcggcctcagtgagcgagcgagcgcgcag | |
| GBA_VG35 | ctgcgcgctcgctcgctcactgaggccgcccgggcaaagcccgggcgtcgggcgac | 2006 |
| | ctttggtcgcccggcctcagtgagcgagcgagcgcgcagagagggagtggccaact | |
| | ccatcactaggggttccttgtagttaatgattaacccgccatgctacttatctacc | |
| | agggtaatggggatcctctagaactatagctagtcGACATTGATTATTGACTAGTT | |
| | ATTAATAGTAATCAATTACGGGGTCATTAGTTCATAGCCCATATATGGAGTTCCGC | |
| | GTTACATAACTTACGGTAAATGGCCCGCCTGGCTGACCGCCCAACGACCCCCGCCC | |
| | ATTGACGTCAATAATGACGTATGTTCCCATAGTAACGCCAATAGGGACTTTCCATT | |
| | GACGTCAATGGGTGGAGTATTTACGGTAAACTGCCCACTTGGCAGTACATCAAGTG | |
| | TATCATATGCCAAGTACGCCCCCTATTGACGTCAATGACGGTAAATGGCCCGCCTG | |
| | GCATTATGCCCAGTACATGACCTTATGGGACTTTCCTACTTGGCAGTACATCTACG | |
| | TATTAGTCATCGCTATTACCATGtcgaggccacgttctgcttcactctccccatct | |
| | cccccccctccccacccccaattttgtatttatttattttttaattattttgtgca | |
| | gcgatgggggcggggggggggggcgcgcgccaggcggggcggggcggggcgagggg | |
| | cggggcggggcgaggcggagaggtgcggcggcagccaatcagagcggcgcgctccg | |
| | aaagtttccttttatggcgaggcggcggcggcggcggccctataaaaagcgaagcg | |
| | cgcggcgggcgggagcaagcttcgtttagtgaaccgtcagatcgcctggagacgcc | |
| | atccacgctgttttgacctccatagaagacaccgggaccgatccagcctccgcgga | |
| | ttcgaatcccggccgggaacggtgcattggaacgcggattccccgtgccaagagtg | |
| | acgtaagtaccgcctatagagtctataggcccacaaaaaatgctttcttcttttaa | |
| | tatacttttttgtttatcttatttctaatactttccctaatctctttctttcaggg | |
| | caataatgatacaatgtatcatgcctctttgcaccattctaaagaataacagtgat | |
| | aatttctgggttaaggcaatagcaatatttctgcatataaatatttctgcatataa | |
| | attgtaactgatgtaagaggtttcatattgctaatagcagctacaatccagctacc | |
| | attctgcttttattttatggttgggataaggctggattattctgagtccaagctag | |
| | gcccttttgctaatcatgttcatacctcttatcttcctcccacagctcctgggcaa | |
| | cgtgctggtctgtgtgctggcccatcactttggcaaagaattgggattcgaaccgg | |
| | tgccgccaccATGGAATTCTCTAGCCCATCTAGAGAGGAATGTCCTAAGCCTCTGT | |
| | CAAGAGTGTCCATCATGGCTGGCAGCCTGACAGGCCTGCTGCTGCTGCAGGCTGTG | |
| | TCCTGGGCCAGTGGAGCCAGGCCCTGCATCCCTAAGTCCTTTGGCTATTCTTCTGT | |
| | GGTCTGTGTGTGTAATGCCACTTACTGTGACAGCTTTGACCCTCCTACCTTCCCTG | |
| | CCCTTGGAACATTCAGCAGATATGAGAGCACCAGATCTGGCAGAAGAATGGAACTG | |
| | AGCATGGGCCCAATCCAGGCCAACCACACAGGCACAGGCCTCCTGCTGACACTGCA | |
| | ACCTGAGCAGAAGTTCCAGAAGGTGAAGGGATTTGGAGGTGCCATGACAGATGCTG | |
| | CTGCTCTGAACATCCTGGCCCTCTCCCCACCTGCTCAGAACCTGCTGCTTAAAAGC | |
| | TACTTCTCTGAGGAAGGCATTGGCTATAACATCATCAGAGTGCCCATGGCCAGCTG | |
| | TGACTTCAGCATCAGAACATACACTTATGCTGATACACCTGATGACTTCCAACTGC | |
| | ACAACTTCAGTCTGCCTGAAGAGGACACAAAGCTGAAAATCCCCCTGATCCACAGG | |
| | GCCCTCCAGCTGGCCCAGAGACCTGTGAGCCTGCTGGCCTCTCCTTGGACAAGCCC | |
| | CACCTGGCTGAAGACTAATGGAGCTGTGAATGGCAAGGGCAGCCTGAAGGGCCAGC | |
| | CTGGGGACATCTACCACCAAACCTGGGCTAGGTACTTTGTCAAATTCCTGGATGCC | |
| | TATGCTGAGCATAAGCTGCAATTTTGGGCTGTTACAGCTGAGAATGAGCCTTCTGC | |
| | AGGCCTGCTGTCTGGATATCCTTTCCAGTGCCTGGGCTTCACCCCTGAGCACCAGA | |
| | GAGACTTTATTGCCAGAGATCTGGGGCCAACCCTGGCTAACAGCACACACCACAAT | |
| | GTGAGGCTGCTGATGCTGGATGACCAGAGGCTGCTGCTCCCCCACTGGGCCAAGGT | |
| | GGTGCTGACAGATCCAGAGGCTGCCAAATATGTGCATGGGATTGCTGTCCACTGGT | |
| | ACCTGGATTTCCTGGCCCCTGCCAAGGCCACCCTGGGAGAAACACATAGACTGTTT | |
| | CCTAATACCATGCTGTTTGCCTCTGAGGCCTGTGTGGGCAGCAAGTTCTGGGAACA | |
| | ATCTGTGAGACTGGGCAGCTGGGACAGAGGAATGCAGTACAGCCACAGCATCATTA | |
| | CCAACCTGCTGTATCATGTGGTGGGCTGGACAGACTGGAACCTGGCCCTCAACCCT | |
| | GAAGGGGGCCCCAACTGGGTGAGGAACTTTGTGGACTCTCCTATCATTGTGGATAT | |
| | TACCAAGGATACCTTCTACAAGCAGCCTATGTTCTACCACCTGGGCCACTTCAGCA | |
| | AGTTCATCCCAGAGGGATCTCAGAGGGTGGGCCTTGTGGCATCTCAGAAAAATGAC | |
| | CTAGATGCTGTTGCCCTGATGCACCCTGATGGGTCAGCAGTGGTAGTGGTCCTGAA | |
| | TAGAAGCTCCAAGGATGTGCCACTGACTATCAAGGACCCAGCTGTAGGATTTCTGG | |
| | AAACCATCAGTCCTGGGTACAGCATCCACACTTACCTCTGGAGGAGGCAGtagtaa | |
| | ctcgaggacggggtgaactacgcctgaggatccgatctttttccctctgccaaaaa | |
| | ttatggggacatcatgaagccccttgagcatctgacttctggctaataaaggaaat | |
| | ttattttcattgcaatagtgtgttggaattttttgtgtctctcactcggcctaggt | |
| | agataagtagcatggcgggttaatcattaactacaaggaacccctagtgatggagt | |
| | tggccactccctctctgcgcgctcgctcgctcactgaggccgggcgaccaaaggtc | |
| | gcccgacgcccgggctttgcccgggcggcctcagtgagcgagcgagcgcgcag | |
| GBA_VG36 | ctgcgcgctcgctcgctcactgaggccgcccgggcaaagcccgggcgtcgggcgac | 2007 |
| | ctttggtcgcccggcctcagtgagcgagcgagcgcgcagagagggagtggccaact | |
| | ccatcactaggggttcctTGTAGTTAATGATTAACCCGCCATGCTACTTATCTACC | |
| | AGGGTAATGGGGATCCTCTAGAACTATAGCTAGTCGACATTGATTATTGACTAGTT | |
| | ATTAATAGTAATCAATTACGGGGTCATTAGTTCATAGCCCATATATGGAGTTCCGC | |
| | GTTACATAACTTACGGTAAATGGCCCGCCTGGCTGACCGCCCAACGACCCCCGCCC | |
| | ATTGACGTCAATAATGACGTATGTTCCCATAGTAACGCCAATAGGGACTTTCCATT | |
| | GACGTCAATGGGTGGAGTATTTACGGTAAACTGCCCACTTGGCAGTACATCAAGTG | |
| | TATCATATGCCAAGTACGCCCCCTATTGACGTCAATGACGGTAAATGGCCCGCCTG | |
| | GCATTATGCCCAGTACATGACCTTATGGGACTTTCCTACTTGGCAGTACATCTACG | |
| | TATTAGTCATCGCTATTACCATGTCGAGGccacgttctgcttcactctccccatct | |
| | cccccccctccccacccccaattttgtatttatttattttttaattattttgtgca | |
| | gcgatgggggcggggggggggggcgcgcgccaggcggggcggggcggggcgagggg | |
| | cggggcggggcgaggcggagaggtgcggcggcagccaatcagagcggcgcgctccg | |
| | aaagtttccttttatggcgaggcggcggcggcggcggccctataaaaagcgaagcg | |
| | cgcggcgggCGGGAGCAAGCTTCGTTTAGTGAACCGtcagatcgcctggagacgcc | |
| | atccacgctgttttgacctccatagaagacaccgggaccgatccagcctccgcgga | |
| | ttcgaatcccggccgggaacggtgcattggaacgcggattccccgtgccaagagtg | |
| | acgtaagtaccgcctatagagtctataggcccacaaaaaatgctttcttcttttaa | |
| | tatacttttttgtttatcttatttctaatactttccctaatctctttctttcaggg | |
| | caataatgatacaatgtatcatgcctctttgcaccattctaaagaataacagtgat | |
| | aatttctgggttaaggcaatagcaatatttctgcatataaatatttctgcatataa | |
| | attgtaactgatgtaagaggtttcatattgctaatagcagctacaatccagctacc | |
| | attctgcttttattttatggttgggataaggctggattattctgagtccaagctag | |
| | gcccttttgctaatcatgttcatacctcttatcttcctcccacagctcctgggcaa | |
| | cgtgctggtctgtgtgctggcccatcactttggcaaagaattGGGATTCGAACCGG | |
| | TGCCGCCACCATGGAATTCTCTAGCCCATCTAGAGAGGAATGTCCTAAGCCTCTGT | |
| | CAAGAGTGTCCATCATGGCTGGCAGCCTGACAGGCCTGCTGCTGCTGCAGGCTGTG | |
| | TCCTGGGCCAGTGGAGCCAGGCCCTGCATCCCTAAGTCCTTTGGCTATTCTTCTGT | |
| | GGTCTGTGTGTGTAATGCCACTTACTGTGACAGCTTTGACCCTCCTACCTTCCCTG | |
| | CCCTTGGAACATTCAGCAGATATGAGAGCACCAGATCTGGCAGAAGAATGGAACTG | |
| | AGCATGGGCCCAATCCAGGCCAACCACACAGGCACAGGCCTCCTGCTGACACTGCA | |
| | ACCTGAGCAGAAGTTCCAGAAGGTGAAGGGATTTGGAGGTGCCATGACAGATGCTG | |
| | CTGCTCTGAACATCCTGGCCCTCTCCCCACCTGCTCAGAACCTGCTGCTTAAAAGC | |
| | TACTTCTCTGAGGAAGGCATTGGCTATAACATCATCAGAGTGCCCATGGCCAGCTG | |
| | TGACTTCAGCATCAGAACATACACTTATGCTGATACACCTGATGACTTCCAACTGC | |
| | ACAACTTCAGTCTGCCTGAAGAGGACACAAAGCTGAAAATCCCCCTGATCCACAGG | |
| | GCCCTCCAGCTGGCCCAGAGACCTGTGAGCCTGCTGGCCTCTCCTTGGACAAGCCC | |
| | CACCTGGCTGAAGACTAATGGAGCTGTGAATGGCAAGGGCAGCCTGAAGGGCCAGC | |
| | CTGGGGACATCTACCACCAAACCTGGGCTAGGTACTTTGTCAAATTCCTGGATGCC | |
| | TATGCTGAGCATAAGCTGCAATTTTGGGCTGTTACAGCTGAGAATGAGCCTTCTGC | |
| | AGGCCTGCTGTCTGGATATCCTTTCCAGTGCCTGGGCTTCACCCCTGAGCACCAGA | |
| | GAGACTTTATTGCCAGAGATCTGGGGCCAACCCTGGCTAACAGCACACACCACAAT | |
| | GTGAGGCTGCTGATGCTGGATGACCAGAGGCTGCTGCTCCCCCACTGGGCCAAGGT | |
| | GGTGCTGACAGATCCAGAGGCTGCCAAATATGTGCATGGGATTGCTGTCCACTGGT | |
| | ACCTGGATTTCCTGGCCCCTGCCAAGGCCACCCTGGGAGAAACACATAGACTGTTT | |
| | CCTAATACCATGCTGTTTGCCTCTGAGGCCTGTGTGGGCAGCAAGTTCTGGGAACA | |
| | ATCTGTGAGACTGGGCAGCTGGGACAGAGGAATGCAGTACAGCCACAGCATCATTA | |
| | CCAACCTGCTGTATCATGTGGTGGGCTGGACAGACTGGAACCTGGCCCTCAACCCT | |
| | GAAGGGGGCCCCAACTGGGTGAGGAACTTTGTGGACTCTCCTATCATTGTGGATAT | |
| | TACCAAGGATACCTTCTACAAGCAGCCTATGTTCTACCACCTGGGCCACTTCAGCA | |
| | AGTTCATCCCAGAGGGATCTCAGAGGGTGGGCCTTGTGGCATCTCAGAAAAATGAC | |
| | CTAGATGCTGTTGCCCTGATGCACCCTGATGGGTCAGCAGTGGTAGTGGTCCTGAA | |
| | TAGAAGCTCCAAGGATGTGCCACTGACTATCAAGGACCCAGCTGTAGGATTTCTGG | |
| | AAACCATCAGTCCTGGGTACAGCATCCACACTTACCTCTGGAGGAGGCAGTAGTAA | |
| | CCTCGAGGTACCAGGAGCTCTTCTCCTAGTGAATTCTACCAGTGCCATAGATAGTT | |
| | AAGTGAATTCTACCAGTGCCATAGATAGTTAAGTGAATTCTACCAGTGCCATAGAT | |
| | AGTTAAGTGAATTCTACCAGTGCCATACTGCAGTCAGGTCTATACCATCGAGGACG | |
| | GGGTGAACTACGCCTGAGGATCCgatctttttccctctgccaaaaattatggggac | |
| | atcatgaagccccttgagcatctgacttctggctaataaaggaaatttattttcat | |
| | tgcaatagtgtgttggaattttttgtgtctctcactcgGCCTAGGTAGATAAGTAG | |
| | CATGGCGGGTTAATCATTAACTACAaggaacccctagtgatggagttggccactcc | |
| | ctctctgcgcgctcgctcgctcactgaggccgggcgaccaaaggtcgcccgacgcc | |
| | cgggctttgcccgggggcctcagtgagcgagcgagcgcgcag | |

[0598] In some embodiments, the viral genome of an AAV particle described herein comprises a nucleotide sequence comprising one or more, e.g., all of, the components provided in Table 9 or Table 10, or sequences having at least 70%, at least 75%, at least 80%, at least 85%, at least 90%, at least 95% or at least 99% sequence identity thereto.

[0599] In some embodiments, the viral genome of an AAV particle described herein comprises a GBA1 variant nucleotide sequence comprising SEQ ID NO: 2002, e.g., as shown in Table 9, or a sequence having at least 95% identity thereto. In some embodiments, said AAV particle comprises improved GC content and reduced immunogenicity compared to an AAV particle comprising a GBA1 variant nucleotide sequence comprising SEQ ID NO: 1773, e.g., as shown in Table 7. In some embodiments, the viral genome of an AAV particle described herein comprises a signal sequence and GBA1 variant nucleotide sequence comprising SEQ ID NOs: 2005 and 2002, e.g., as shown in Table 9, or sequences having at least 95% identity thereto. In some embodiments, said AAV particle comprises improved GC content and reduced immunogenicity compared to an AAV particle comprising a signal sequence and GBA1 variant nucleotide sequence comprising SEQ ID NOs: 1850 and 1773, e.g., as shown in Table 7. In some embodiments, the viral genome of an AAV particle described herein comprises a nucleotide sequence comprising SEQ ID NO: 2006, e.g., as shown in Table 9, or a sequence having at least 95% identity thereto. In some embodiments, said AAV particle comprises improved GC content and reduced immunogenicity compared to an AAV particle comprising a nucleotide sequence comprising SEQ ID NO: 1812, e.g., as shown in Table 7.

[0600] In some embodiments, the viral genome of an AAV particle described herein comprises a GBA1 variant nucleotide sequence comprising SEQ ID NO: 2002, e.g., as shown in Table 10, or a sequence having at least 95% identity thereto. In some embodiments, said AAV particle comprises improved GC content and reduced immunogenicity compared to an AAV particle comprising a GBA1 variant nucleotide sequence comprising SEQ ID NO: 1773, e.g., as shown in Table 8. In some embodiments, the viral genome of an AAV particle described herein comprises a signal sequence and GBA1 variant nucleotide sequence comprising SEQ ID NOs: 2005 and 2002, e.g., as shown in Table 10, or sequences having at least 95% identity thereto. In some embodiments, said AAV particle comprises improved GC content and reduced immunogenicity compared to an AAV particle comprising a signal sequence and GBA1 variant nucleotide sequence comprising SEQ ID NOs: 1850 and 1773, e.g., as shown in Table 8. In some embodiments, the viral genome of an AAV particle described herein comprises a nucleotide sequence comprising SEQ ID NO: 2007, e.g., as shown in Table 10, or a sequence having at least 95% identity thereto. In some embodiments, said AAV particle comprises improved GC content and reduced immunogenicity compared to an AAV particle comprising a nucleotide sequence comprising SEQ ID NO: 1828, e.g., as shown in Table 8.

TABLE 7
Sequence Regions in ITR-to-ITR Sequences

| | GBA_VG17 (SEQ ID NO: 1812) | | |
|---|---|---|---|
| | Region SEQ | Region | Position in SEQ |
| Sequence Regions | ID NO | length | ID NO: 1812 |
| 5′ ITR | 1829 | 130 | 1-130 |
| CMVie | 1831 | 380 | 204-583 |
| CB promoter | 1834 | 260 | 590-849 |
| Intron | 1842 | 566 | 877-1442 |
| Signal sequence | 1850 | 117 | 1467-1583 |
| GBA1 Variant 1 coding | 1773 | 1,491 | 1584-3074 |
| sequence | | | |
| PolyA | 1846 | 127 | 3114-3240 |
| 3′ ITR | 1830 | 130 | 3284-3413 |

TABLE 8
Sequence Regions in ITR-to-ITR Sequences

| | GBA_VG33 (SEQ ID NO: 1828) | | |
|---|---|---|---|
| | Region SEQ | Region | Position in SEQ |
| Sequence Regions | ID NO | length | ID NO: 1828 |
| 5′ ITR | 1829 | 130 | 1-130 |
| CMVie | 1831 | 380 | 204-583 |
| CB promoter | 1834 | 260 | 590-849 |
| Intron | 1842 | 566 | 877-1442 |
| Signal sequence | 1850 | 117 | 1467-1583 |
| GBA1 Variant 1 coding | 1773 | 1,491 | 1584-3074 |
| sequence | | | |
| miR183 binding site | 1847 | 22 | 3108-3129 |
| Spacer | 1848 | 8 | 3130-3137 |
| miR183 binding site | 1847 | 22 | 3138-3159 |
| Spacer | 1848 | 8 | 3160-3167 |
| miR183 binding site | 1847 | 22 | 3168-3189 |
| Spacer | 1848 | 8 | 3190-3197 |
| miR183 binding site | 1847 | 22 | 3198-3219 |
| PolyA | 1846 | 127 | 3272-3398 |
| 3′ ITR | 1830 | 130 | 3442-3751 |

TABLE 9
Sequence Regions in ITR-to-ITR Sequences

| | GBA_VG35 (SEQ ID NO: 2006) | | |
|---|---|---|---|
| | Region SEQ | Region | Position in SEQ |
| Sequence Regions | ID NO | length | ID NO: 2006 |
| 5′ ITR | 1829 | 130 | 1-130 |
| CMVie | 1831 | 380 | 204-583 |
| CB promoter | 1834 | 260 | 590-849 |
| Intron | 1842 | 566 | 877-1442 |
| Signal sequence | 2005 | 117 | 1467-1583 |
| GBA1 Variant 4 coding | 2002 | 1491 | 1584-3074 |
| sequence | | | |
| PolyA | 1846 | 127 | 3114-3240 |
| 3′ ITR | 1830 | 130 | 3284-3413 |

[0601] In some embodiments, the AAV particle comprises a nucleotide sequence encoding a wildtype GBA1 protein, wherein the nucleotide sequence comprises the sequence of SEQ ID NO: 2002 or a sequence that is at least 93% identical thereto.

[0602] In some embodiments, the AAV particle comprising the nucleotide sequence of SEQ ID NO: 2002 further comprises an ITR sequence that is 130 nucleotides in length, wherein, optionally, the ITR sequence comprises the nucleotide sequence of SEQ ID NO: 1829 or SEQ ID NO: 1830 or a sequence that is at least 70% (e.g., at least 70%, at least 80%, at least 90%, at least 91%, at least 92%, at least 93%, at least 94%, at least 95%, at least 96%, at least 97%, at least 98%, or at least 99%) identical thereto. In some embodiments, the AAV particle comprises a 5′ ITR comprising the nucleotide sequence of SEQ ID NO: 1829 or a sequence that is at least 70% (e.g., at least 70%, at least 80%, at least 90%, at least 91%, at least 92%, at least 93%, at least 94%, at least 95%, at least 96%, at least 97%, at least 98%, or at least 99%) identical thereto and/or a 3′ITR comprising the nucleotide sequence of SEQ ID NO: 1830 or a sequence that is at least 70% (e.g., at least 70%, at least 80%, at least 90%, at least 91%, at least 92%, at least 93%, at least 94%, at least 95%, at least 96%, at least 97%, at least 98%, or at least 99%) identical thereto.

[0603] In some embodiments, the AAV particle comprising the nucleotide sequence of SEQ ID NO: 2002 further comprises a CMVie sequence and/or CB promoter operably linked to the nucleotide sequence encoding a GBA1 protein, wherein, optionally, the CMVie sequence comprising the nucleotide sequence of SEQ ID NO: 1831 or a sequence that is at least 70% (e.g., at least 70%, at least 80%, at least 90%, at least 91%, at least 92%, at least 93%, at least 94%, at least 95%, at least 96%, at least 97%, at least 98%, or at least 99%) identical thereto, and the CB promoter comprises the nucleotide sequence of SEQ ID NO: 1834 or a sequence that is at least 70% (e.g., at least 70%, at least 80%, at least 90%, at least 91%, at least 92%, at least 93%, at least 94%, at least 95%, at least 96%, at least 97%, at least 98%, or at least 99%) identical thereto.

[0604] In some embodiments, the AAV particle comprising the nucleotide sequence of SEQ ID NO: 2002 further comprises a sequence encoding a signal peptide, wherein the sequence encoding the signal peptide comprises the nucleotide sequence of 2005 or a sequence that is at least 70% (e.g., at least 70%, at least 80%, at least 90%, at least 91%, at least 92%, at least 93%, at least 94%, at least 95%, at least 96%, at least 97%, at least 98%, or at least 99%) identical thereto, wherein the sequence encoding the signal peptide is 5′ to the sequence encoding the GBA1 protein.

[0605] In some embodiments, the AAV particle comprising the nucleotide sequence of SEQ ID NO: 2002 further comprises an intron region comprising the nucleotide sequence of SEQ ID NO: 1842 or a sequence that is at least 70% (e.g., at least 70%, at least 80%, at least 90%, at least 91%, at least 92%, at least 93%, at least 94%, at least 95%, at least 96%, at least 97%, at least 98%, or at least 99%) identical thereto.

[0606] In some embodiments, the AAV particle comprising the nucleotide sequence of SEQ ID NO: 2002 further comprises a polyA sequence comprising the nucleotide sequence of SEQ ID NO: 1846 or a sequence that is at least 70% (e.g., at least 70%, at least 80%, at least 90%, at least 91%, at least 92%, at least 93%, at least 94%, at least 95%, at least 96%, at least 97%, at least 98%, or at least 99%) identical thereto.

[0607] In some embodiments, the AAV particle comprising the nucleotide sequence of SEQ ID NO: 2002 further comprises, from 5′ to 3′, one or more of, e.g., all of, an ITR comprising the nucleotide sequence of SEQ ID NO: 1829 or a sequence that is at least 70% (e.g., at least 70%, at least 80%, at least 90%, at least 91%, at least 92%, at least 93%, at least 94%, at least 95%, at least 96%, at least 97%, at least 98%, or at least 99%) identical thereto; a CMVie sequence comprising the nucleotide sequence of SEQ ID NO: 1831 or a sequence that is at least 70% (e.g., at least 70%, at least 80%, at least 90%, at least 91%, at least 92%, at least 93%, at least 94%, at least 95%, at least 96%, at least 97%, at least 98%, or at least 99%) identical thereto; a CB promoter comprising the nucleotide sequence of SEQ ID NO: 1834 or a sequence that is at least 70% (e.g., at least 70%, at least 80%, at least 90%, at least 91%, at least 92%, at least 93%, at least 94%, at least 95%, at least 96%, at least 97%, at least 98%, or at least 99%) identical thereto; an intron comprising the nucleotide sequence of SEQ ID NO: 1842 or a sequence that is at least 70% (e.g., at least 70%, at least 80%, at least 90%, at least 91%, at least 92%, at least 93%, at least 94%, at least 95%, at least 96%, at least 97%, at least 98%, or at least 99%) identical thereto; a signal sequence comprising the nucleotide sequence of SEQ ID NO: 2005 or a sequence that is at least 70% (e.g., at least 70%, at least 80%, at least 90%, at least 91%, at least 92%, at least 93%, at least 94%, at least 95%, at least 96%, at least 97%, at least 98%, or at least 99%) identical thereto; a polyA sequence comprising the nucleotide sequence of SEQ ID NO: 1846; and/or an ITR comprising the nucleotide sequence of SEQ ID NO: 1830 or a sequence that is at least 70% (e.g., at least 70%, at least 80%, at least 90%, at least 91%, at least 92%, at least 93%, at least 94%, at least 95%, at least 96%, at least 97%, at least 98%, or at least 99%) identical thereto.

[0608] In some embodiments, the AAV particle comprises a viral genome comprising a sequence encoding a GBA1 protein, wherein the sequence comprises SEQ ID NO: 2002 or a sequence that is at least 93% (e.g., at least 95%, at least 96%, at least 97%, at least 98%, or at least 99% identical thereto). In some embodiments, the AAV particle comprises a viral genome comprising the nucleotide sequence of SEQ ID NO: 2006 (GBA_VG35) or a nucleotide sequence that is at least 97% (e.g., at least 97%, at least 98%, or at least 99%) identical thereto. In some embodiments, the viral genome comprising the nucleotide sequence of SEQ ID NO: 2006 comprises in 5′ to 3′ order: a 5′ ITR sequence region comprising the nucleotide sequence of SEQ ID NO: 1829, or a nucleotide sequence at least 95% (e.g., at least 95%, at least 96%, at least 97%, at least 98%, or at least 99%) identical thereto; a CMVie enhancer comprising the nucleotide sequence of SEQ ID NO: 1831, or a nucleotide sequence at least 95% identical thereto; a CB promoter comprising the nucleotide sequence of SEQ ID NO: 1834, or a nucleotide sequence at least 95% (e.g., at least 95%, at least 96%, at least 97%, at least 98%, or at least 99%) identical thereto; an intron comprising the nucleotide sequence of SEQ ID NO: 1842, or a nucleotide sequence at least 95% (e.g., at least 95%, at least 96%, at least 97%, at least 98%, or at least 99%) identical thereto; a nucleotide sequence encoding a signal sequence comprising the nucleotide sequence of SEQ ID NO: 2005, or a nucleotide sequence at least 95% (e.g., at least 95%, at least 96%, at least 97%, at least 98%, or at least 99%) identical thereto; a nucleotide sequence encoding a GBA1 protein comprising the nucleotide sequence of SEQ ID NO: 2002 or a nucleotide sequence at least 94% (e.g., at least 94%, at least 95%, at least 96%, at least 97%, at least 98%, or at least 99%) identical to the nucleotide sequence of SEQ ID NO: 2002; a polyadenylation sequence comprising the nucleotide sequence of SEQ ID NO: 1846, or a nucleotide sequence at least 95% (e.g., at least 95%, at least 96%, at least 97%, at least 98%, or at least 99%) identical thereto; and a 3′ ITR sequence region comprising the nucleotide sequence of SEQ ID NO: 1830, or a nucleotide sequence at least 95% (e.g., at least 95%, at least 96%, at least 97%, at least 98%, or at least 99%) identical thereto.

[0609] In some embodiments, the AAV viral genome does not comprise a miR-183 binding site.

[0610] In some embodiments, the nucleotide sequence encoding a GBA1 protein comprises a sequence that is at least 94% identical to SEQ ID NO: 2002. In some embodiments, the nucleotide sequence encoding a GBA protein comprises a sequence that is at least 95% identical to SEQ ID NO: 2002. In some embodiments, the nucleotide sequence encoding a GBA1 protein comprises a sequence that is at least 96% identical to SEQ ID NO: 2002. In some embodiments, the nucleotide sequence encoding a GBA1 protein comprises a sequence that is at least 97% identical to SEQ ID NO: 2002. In some embodiments, the nucleotide sequence encoding a GBA1 protein comprises a sequence that is at least 98% identical to SEQ ID NO: 2002. In some embodiments, the nucleotide sequence encoding a GBA1 protein comprises a sequence that is at least 99% identical to SEQ ID NO: 2002. In some embodiments, the nucleotide sequence encoding a GBA1 protein comprises SEQ ID NO: 2002.

[0611] In some embodiments, the viral genome comprising the nucleotide sequence of SEQ ID NO: 2006, or a nucleotide sequence that is at least 97% (e.g., at least 97%, at least 98%, or at least 99%) identical thereto, encodes a GBA1 protein comprising the amino acid sequence of SEQ ID NO: 1775.

TABLE 10
Sequence Regions in ITR-to-ITR Sequences

| | GBA_VG36 (SEQ ID NO: 2007) | | |
|---|---|---|---|
| | Region SEQ | Region | Position in SEQ |
| Sequence Regions | ID NO | length | ID NO: 2007 |
| 5′ ITR | 1829 | 130 | 1-130 |
| CMVie | 1831 | 380 | 204-583 |
| CB promoter | 1834 | 260 | 590-849 |
| Intron | 1842 | 566 | 877-1442 |
| Signal sequence | 2005 | 117 | 1467-1583 |
| GBA1 Variant 4 coding | 2002 | 1491 | 1584-3074 |
| sequence | | | |
| miR183 binding site | 1847 | 22 | 3108-3129 |
| Spacer | 1848 | 8 | 3130-3137 |
| miR183 binding site | 1847 | 22 | 3138-3159 |
| Spacer | 1848 | 8 | 3160-3167 |
| miR183 binding site | 1847 | 22 | 3168-3189 |
| Spacer | 1848 | 8 | 3190-3197 |
| miR183 binding site | 1847 | 22 | 3198-3219 |
| PolyA | 1846 | 127 | 3272-3398 |
| 3′ ITR | 1830 | 130 | 3442-3751 |

[0612] In some embodiments, the AAV particle comprises a nucleotide sequence encoding a wildtype GBA1 protein, wherein the nucleotide sequence comprises the sequence of SEQ ID NO: 2002 or a sequence that is at least 93% (e.g., at least 93%, at least 94%, at least 95%, at least 96%, at least 97%, at least 98%, or at least 99%) identical thereto.

[0613] In some embodiments, the AAV particle comprising the sequence of SEQ ID NO: 2002 further comprises at least one miR183 binding site. In some embodiments, the AAV particle comprising the sequence of SEQ ID NO: 2002 further comprises four miR183 binding sites, wherein each miR183 binding site comprises the sequence of SEQ ID NO: 1847 or a sequence that is at least 70% (e.g., at least 70%, at least 80%, at least 90%, at least 91%, at least 92%, at least 93%, at least 94%, at least 95%, at least 96%, at least 97%, at least 98%, or at least 99%) identical thereto.

[0614] In some embodiments, the AAV particle comprising the sequence of SEQ ID NO: 2002 further comprises at least one spacer sequence between two miR binding sites, wherein each spacer sequence comprises the sequence of SEQ ID NO: 1848 or a sequence that is at least 75% identical thereto (e.g., at least 75%, at least 80%, at least 90%, at least 91%, at least 92%, at least 93%, at least 94%, at least 95%, at least 96%, at least 97%, at least 98%, or at least 99% identical thereto).

[0615] In some embodiments, the AAV particle comprising the sequence of SEQ ID NO: 2002 further comprises a miR binding site series comprising SEQ ID NO: 1849 or a sequence that is at least 70% (e.g., at least 70%, at least 80%, at least 90%, at least 91%, at least 92%, at least 93%, at least 94%, at least 95%, at least 96%, at least 97%, at least 98%, or at least 99%) identical thereto.

[0616] In some embodiments, the AAV particle comprising the nucleotide sequence of SEQ ID NO: 2002 further comprises, from 5′ to 3′, one or more of, e.g., all of, an ITR comprising the nucleotide sequence of SEQ ID NO: 1829 or a sequence that is at least 70% (e.g., at least 70%, at least 80%, at least 90%, at least 91%, at least 92%, at least 93%, at least 94%, at least 95%, at least 96%, at least 97%, at least 98%, or at least 99%) identical thereto; a CMVie sequence comprising the nucleotide sequence of SEQ ID NO: 1831 or a sequence that is at least 70% (e.g., at least 70%, at least 80%, at least 90%, at least 91%, at least 92%, at least 93%, at least 94%, at least 95%, at least 96%, at least 97%, at least 98%, or at least 99%) identical thereto; a CB promoter comprising the nucleotide sequence of SEQ ID NO: 1834 or a sequence that is at least 70% (e.g., at least 70%, at least 80%, at least 90%, at least 91%, at least 92%, at least 93%, at least 94%, at least 95%, at least 96%, at least 97%, at least 98%, or at least 99%) identical thereto; an intron comprising the nucleotide sequence of SEQ ID NO: 1842 or a sequence that is at least 70% (e.g., at least 70%, at least 80%, at least 90%, at least 91%, at least 92%, at least 93%, at least 94%, at least 95%, at least 96%, at least 97%, at least 98%, or at least 99%) identical thereto; a signal sequence comprising the nucleotide sequence of SEQ ID NO: 2005 or a sequence that is at least 70% (e.g., at least 70%, at least 80%, at least 90%, at least 91%, at least 92%, at least 93%, at least 94%, at least 95%, at least 96%, at least 97%, at least 98%, or at least 99%) identical thereto; a miR183 binding site series comprising the nucleotide sequence of SEQ ID NO: 1849 or a sequence that is at least 70% (e.g., at least 70%, at least 80%, at least 90%, at least 91%, at least 92%, at least 93%, at least 94%, at least 95%, at least 96%, at least 97%, at least 98%, or at least 99%) identical thereto; a polyA sequence comprising the nucleotide sequence of SEQ ID NO: 1846; and/or an ITR comprising the nucleotide sequence of SEQ ID NO: 1830 or a sequence that is at least 70% (e.g., at least 70%, at least 80%, at least 90%, at least 91%, at least 92%, at least 93%, at least 94%, at least 95%, at least 96%, at least 97%, at least 98%, or at least 99%) identical thereto.

[0617] In some embodiments, the AAV particle comprises a viral genome comprising a sequence encoding a GBA1 protein, wherein the sequence comprises SEQ ID NO: 2002 or a sequence that is at least 93% identical thereto (e.g., at least 93%, at least 94%, at least 95%, at least 96%, at least 97%, at least 98%, or at least 99% identical thereto). In some embodiments, the AAV particle comprises a viral genome comprising the nucleotide sequence of SEQ ID NO: 2007 (GBA_VG36) or a nucleotide sequence that is at least 97% identical thereto (e.g., at least 97%, at least 98%, or at least 99% identical thereto). In some embodiments, the viral genome comprising the nucleotide sequence of SEQ ID NO: 2007 comprises in 5′ to 3′ order: a 5′ ITR sequence region comprising the nucleotide sequence of SEQ ID NO: 1829, or a nucleotide sequence at least 95% identical thereto (e.g., at least 95%, at least 96%, at least 97%, at least 98%, or at least 99% identical thereto); a CMVie enhancer comprising the nucleotide sequence of SEQ ID NO: 1831, or a nucleotide sequence at least 95% identical thereto (e.g., at least 95%, at least 96%, at least 97%, at least 98%, or at least 99% identical thereto); a CB promoter comprising the nucleotide sequence of SEQ ID NO: 1834, or a nucleotide sequence at least 95% identical thereto (e.g., at least 95%, at least 96%, at least 97%, at least 98%, or at least 99% identical thereto); an intron comprising the nucleotide sequence of SEQ ID NO: 1842, or a nucleotide sequence at least 95% identical thereto (e.g., at least 95%, at least 96%, at least 97%, at least 98%, or at least 99% identical thereto); a nucleotide sequence encoding a signal sequence comprising the nucleotide sequence of SEQ ID NO: 2005, or a nucleotide sequence at least 95% identical thereto (e.g., at least 95%, at least 96%, at least 97%, at least 98%, or at least 99% identical thereto); a nucleotide sequence encoding a GBA1 protein comprising the nucleotide sequence of SEQ ID NO: 2002 or a nucleotide sequence at least 93% (e.g., (e.g., at least 93%, at least 94%, at least 95%, at least 96%, at least 97%, at least 98%, or at least 99%)) identical to the nucleotide sequence of SEQ ID NO: 2002; a miR183 binding site series comprising the sequence of SEQ ID NO: 1849 or a sequence that is at least 95% identical thereto (e.g., at least 95%, at least 96%, at least 97%, at least 98%, or at least 99% identical thereto); a polyadenylation sequence comprising the nucleotide sequence of SEQ ID NO: 1846, or a nucleotide sequence at least 95% identical thereto (e.g., at least 95%, at least 96%, at least 97%, at least 98%, or at least 99% identical thereto); and a 3′ ITR sequence region comprising the nucleotide sequence of SEQ ID NO: 1830, or a nucleotide sequence at least 95% identical thereto (e.g., at least 95%, at least 96%, at least 97%, at least 98%, or at least 99% identical thereto).

[0618] In some embodiments, the viral genome comprising the nucleotide sequence of SEQ ID NO: 2007, or a nucleotide sequence that is at least 97% identical thereto (e.g., at least 97%, at least 98%, or at least 99% identical thereto), encodes a GBA1 protein comprising the amino acid sequence of SEQ ID NO: 1775.

[0619] In some embodiments, the AAV viral genome further comprises a nucleic acid encoding a capsid protein, e.g., a structural protein. In some embodiments, the capsid protein comprises a VP1 polypeptide, a VP2 polypeptide, and/or a VP3 polypeptide. In some embodiments, the VP1 polypeptide, the VP2 polypeptide, and/or the VP3 polypeptide are encoded by at least one Cap gene. In some embodiments, the AAV viral genome further comprises a nucleic acid encoding a Rep protein, e.g., a non-structural protein. In some embodiments, the Rep protein comprises a Rep78 protein, a Rep68, Rep52 protein, and/or a Rep40 protein. In some embodiments, the Rep78 protein, the Rep68 protein, the Rep52 protein, and/or the Rep40 protein are encoded by at least one Rep gene.

[0620] In some embodiment, the AAV particle comprising a viral genome comprising the nucleotide sequences of SEQ ID NO: 2006 or SEQ ID NO: 2007, or a sequence having at least 97%, at least 98%, or at least 99% sequence identity to SEQ ID NO: 2006 or SEQ ID NO: 2007. In some embodiments, the viral genome is packaged in a capsid protein having a serotype or a functional variant thereof selected from Table 1. In some embodiments, the capsid protein comprise a VOY101, VOY201, AAVPHP.N (PHP.N), AAVPHP.B (PHP.B), AAVPHP.A (PHP.A), PHP.B2, PHP.B3, G2B4, G2B5, AAV5, AAV9, AAVrh10, or a functional variant thereof. In some embodiments, the capsid protein comprises a VOY101 capsid protein, or functional variant thereof. In some embodiments, the capsid protein comprises an AAV9 capsid protein, or functional variant thereof. In some embodiments, the capsid protein comprises an AAV5 capsid protein, or functional variant thereof.

[0621] In some embodiments, the AAV particle comprising a viral genome comprising the nucleotide sequence of SEQ ID NO: 2006 or SEQ ID NO: 2007, or a sequence having at least 97%, at least 98%, or at least 99% sequence identity thereto comprises a capsid protein comprising the amino acid sequence of SEQ ID NO: 138, or a sequence that is at least 90%, at least 91%, at least 92%, at least 93%, at least 94%, at least 95%, at least 96%, at least 97%, at least 98%, or at least 99% sequence identical thereto. In some embodiments, the capsid protein comprises an amino acid sequence having at least one, two, or three modifications, but not more than 30, 20 or 10 modifications of the amino acid sequence of SEQ ID NO: 138. In some embodiments, the capsid protein is encoded by the nucleotide sequence of SEQ ID NO: 137, or a nucleotide sequence having at least 70%, at least 75%, at least 80%, least 85%, at least 90%, at least 91%, at least 92%, at least 93%, at least 94%, at least 95%, at least 96%, at least 97%, at least 98%, or at least 99% identity thereto. In some embodiments, the capsid protein comprises an amino acid substitution at position K449, e.g., a K449R substitution, numbered according to SEQ ID NO:138. In some embodiments, the capsid protein comprises an insert comprising the amino acid sequence of TLAVPFK (SEQ ID NO: 1262), wherein the insert is present immediately subsequent to position 588, relative to a reference sequence numbered according to SEQ ID NO:138. In some embodiments, the capsid protein comprises an amino acid other than “A” at position 587 and/or an amino acid other than “Q” at position 588, numbered according to SEQ ID NO:138. In some embodiments, the capsid protein comprises the amino acid substitution of A587D and/or Q588G, numbered according to SEQ ID NO: 138. In some embodiments, the capsid protein comprises an insert comprising the amino acid sequence PLNGAVHLY (SEQ ID NO: 3648), wherein the amino acid sequence of PLNGAVHLY (SEQ ID NO: 3648) is present immediately subsequent to position 586, relative to a reference sequence numbered according to the amino acid sequence of SEQ ID NO: 138. In some embodiments, the AAV capsid comprises the amino acid sequence of SEQ ID NO: 3636.

[0622] In some embodiments, the AAV particle comprising a viral genome comprising SEQ ID NO: 2006 or SEQ ID NO: 2007, or a sequence having at least 97%, at least 98%, or at least 99% identity thereto, comprises a capsid protein comprising the amino acid sequence of SEQ ID NO: 1, or a sequence substantially identical (e.g., having at least 70%, at least 75%, at least 80%, least 85%, at least 90%, at least 91%, at least 92%, at least 93%, at least 94%, at least 95%, at least 96%, at least 97%, at least 98%, or at least 99% sequence identity) thereto. In some embodiments, the capsid protein comprises an amino acid sequence having at least one, two or three modifications, but not more than 30, not more than 20 or not more than 10 modifications of the amino acid sequence of SEQ ID NO: 1. In some embodiments, the capsid protein is encoded by the nucleotide sequence of SEQ ID NO: 2, or a nucleotide sequence substantially identical (e.g., having at least 70%, at least 75%, at least 80%, least 85%, at least 90%, at least 91%, at least 92%, at least 93%, at least 94%, at least 95%, at least 96%, at least 97%, at least 98%, or at least 99% sequence identity) thereto.

[0623] The present disclosure provides in some embodiments, vectors, cells, and/or AAV particles comprising the above identified viral genomes.

### Self-Complementary and Single Strand Vectors

[0624] In some embodiments, the AAV vector used in the present disclosure is a single strand vector (ssAAV).

[0625] In some embodiments, the AAV vectors may be self-complementary AAV vectors (scAAVs). See, e.g., U.S. Pat. No. 7,465,583. scAAV vectors contain both DNA strands that anneal together to form double stranded DNA. By skipping second strand synthesis, scAAVs allow for rapid expression in the cell.

[0626] In some embodiments, the AAV vector used in the present disclosure is a scAAV.

[0627] Methods for producing and/or modifying AAV vectors are disclosed in the art such as pseudotyped AAV vectors (International Patent Publication Nos. WO200028004; WO200123001; WO2004112727; WO 2005005610 and WO 2005072364, the content of each of which are incorporated herein by reference in their entirety).

### Viral Genome Size

[0628] In some embodiments, the viral genome of the AAV particles of the present disclosure may be single or double stranded. The size of the vector genome may be small, medium, large or the maximum size.

[0629] In some embodiments, the vector genome, which comprises a nucleic acid sequence encoding GCase protein described herein, may be a small single stranded vector genome. A small single stranded vector genome may be about 2.7 kb to about 3.5 kb in size such as about 2.7, about 2.8, about 2.9, about 3.0, about 3.1, about 3.2, about 3.3, about 3.4, or about 3.5 kb in size. In some embodiments, the small single stranded vector genome may be 3.2 kb in size.

[0630] In some embodiments, the vector genome, which comprises a nucleic acid sequence encoding GCase protein described herein, may be a small double stranded vector genome. A small double stranded vector genome may be about 1.3 to about 1.7 kb in size such as about 1.3, about 1.4, about 1.5, about 1.6, or about 1.7 kb in size. In some embodiments, the small double stranded vector genome may be 1.6 kb in size.

[0631] In some embodiments, the vector genome, which comprises a nucleic acid sequence encoding GCase protein described herein, may be a medium single stranded vector genome. A medium single stranded vector genome may be about 3.6 to about 4.3 kb in size such as about 3.6, about 3.7, about 3.8, about 3.9, about 4.0, about 4.1, about 4.2, or about 4.3 kb in size. In some embodiments, the medium single stranded vector genome may be 4.0 kb in size.

[0632] In some embodiments, the vector genome, which comprises a nucleic acid sequence encoding GCase protein described herein, may be a medium double stranded vector genome. A medium double stranded vector genome may be about 1.8 to about 2.1 kb in size such as about 1.8, about 1.9, about 2.0, or about 2.1 kb in size. In some embodiments, the medium double stranded vector genome may be 2.0 kb in size. Additionally, the vector genome may comprise a promoter and a polyA tail.

[0633] In some embodiments, the vector genome which comprises a nucleic acid sequence encoding GCase protein described herein may be a large single stranded vector genome. A large single stranded vector genome may be 4.4 to 6.0 kb in size such as about 4.4, 4.5, 4.6, 4.7, 4.8, 4.9, 5.0, 5.1, 5.2, 5.3, 5.4, 5.5, 5.6, 5.7, 5.8, 5.9 and 6.0 kb in size. As a non-limiting example, the large single stranded vector genome may be 4.7 kb in size. As another non-limiting example, the large single stranded vector genome may be 4.8 kb in size. As yet another non-limiting example, the large single stranded vector genome may be 6.0 kb in size.

[0634] In some embodiments, the vector genome which comprises a nucleic acid sequence encoding GCase protein described herein may be a large double stranded vector genome. A large double stranded vector genome may be 2.2 to 3.0 kb in size such as about 2.2, 2.3, 2.4, 2.5, 2.6, 2.7, 2.8, 2.9 and 3.0 kb in size. As a non-limiting example, the large double stranded vector genome may be 2.4 kb in size.

### Backbone

[0635] In certain embodiments, a cis-element such as a vector backbone is incorporated into the viral particle encoding, e.g., a GBA1 protein or a GBA1 protein and an enhancement element described herein. Without wishing to be bound by theory, it is believed, in some embodiments, the backbone sequence may contribute to the stability of GBA1 protein expression, and/or the level of expression of the GBA1 protein.

[0636] The present disclosure also provides in some embodiments, a nucleic acid encoding a viral genome, e.g., a viral genome comprising the nucleotide sequence of any of the viral genomes in Tables 18-21 or 29-32, or a nucleotide sequence substantially identical (e.g., having at least 70%, 75%, 80%, 85%, 90%, 95%, 99% or 100%, sequence identity) thereto, an a backbone region suitable for replication of the viral genome in a cell, e.g., a bacterial cell (e.g., wherein the backbone region comprises one or both of a bacterial origin of replication and a selectable marker).

### II. Viral Production

### General Viral Production Process

[0637] Cells for the production of AAV, e.g., rAAV, particles may comprise, in some embodiments, mammalian cells (such as HEK293 cells) and/or insect cells (such as Sf9 cells).

[0638] In various embodiments, AAV production includes processes and methods for producing AAV particles and vectors which can contact a target cell to deliver a payload, e.g. a recombinant viral construct, which includes a nucleotide encoding a payload molecule. In certain embodiments, the viral vectors are adeno-associated viral (AAV) vectors such as recombinant adeno-associated viral (rAAV) vectors. In certain embodiments, the AAV particles are adeno-associated viral (AAV) particles such as recombinant adeno-associated viral (rAAV) particles.

[0639] In some embodiments, disclosed herein is a vector comprising a viral genome of the present disclosure. In some embodiments, disclosed herein is a cell comprising a viral genome of the present disclosure. In some embodiments, the cell is a bacterial cell, a mammalian cell (e.g., a HEK293 cell), or an insect cell (e.g., an Sf9 cell).

[0640] In some embodiments, disclosed herein is a method of making a viral genome. The method comprising providing a nucleic acid encoding a viral genome described herein and a backbone region suitable for replication of the viral genome in a cell, e.g., a bacterial cell (e.g., wherein the backbone region comprises one or both of a bacterial origin of replication and a selectable marker), and excising the viral genome from the backbone region, e.g., by cleaving the nucleic acid molecule at upstream and downstream of the viral genome. In some embodiments, the viral genome comprising a promoter operably linked to nucleic acid comprising a transgene encoding a GBA1 protein (e.g., a GBA1 protein described herein), will be incorporated into an AAV particle produced in the cell. In some embodiments, the cell is a bacterial cell, a mammalian cell (e.g., a HEK293 cell), or an insect cell (e.g., an Sf9 cell).

[0641] In some embodiments, disclosed herein is a method of making a recombinant AAV particle of the present disclosure, the method comprising (i) providing a host cell comprising a viral genome described herein and incubating the host cell under conditions suitable to enclose the viral genome in a capsid protein, e.g., a capsid protein described herein (e.g., a capsid protein listed in Table 1, e.g., a VOY101 capsid protein or functional variant thereof), thereby making the recombinant AAV particle. In some embodiments, the method comprises prior to step (i), introducing a first nucleic acid comprising the viral genome into a cell. In some embodiments, the host cell comprises a second nucleic acid encoding the capsid protein. In some embodiments, the second nucleic acid is introduced into the host cell prior to, concurrently with, or after the first nucleic acid molecule. In some embodiments, the host cell is a bacterial cell, a mammalian cell (e.g., a HEK293 cell), or an insect cell (e.g., an Sf9 cell).

[0642] In various embodiments, methods are provided herein of producing AAV particles or vectors by (a) contacting a viral production cell with one or more viral expression constructs encoding at least one AAV capsid protein, and one or more payload constructs encoding a payload molecule, which can be selected from: a transgene, a polynucleotide encoding protein, and a modulatory nucleic acid; (b) culturing the viral production cell under conditions such that at least one AAV particle or vector is produced, and (c) isolating the AAV particle or vector from the production stream.

[0643] In these methods, a viral expression construct may encode at least one structural protein and/or at least one non-structural protein. The structural protein may include any of the native or wild type capsid proteins VP1, VP2, and/or VP3, or a chimeric protein thereof. The non-structural protein may include any of the native or wild type Rep78, Rep68, Rep52, and/or Rep40 proteins or a chimeric protein thereof.

[0644] In certain embodiments, contacting occurs via transient transfection, viral transduction, and/or electroporation.

[0645] In certain embodiments, the viral production cell is selected from a mammalian cell and an insect cell. In certain embodiments, the insect cell includes a Spodoptera frugiperda insect cell. In certain embodiments, the insect cell includes a Sf9 insect cell. In certain embodiments, the insect cell includes a Sf21 insect cell.

[0646] The payload construct vector of the present disclosure may include, in various embodiments, at least one inverted terminal repeat (ITR) and may include mammalian DNA.

[0647] Also provided are AAV particles and viral vectors produced according to the methods described herein.

[0648] In various embodiments, the AAV particles of the present disclosure may be formulated as a pharmaceutical composition with one or more acceptable excipients.

[0649] In certain embodiments, an AAV particle or viral vector may be produced by a method described herein.

[0650] In certain embodiments, the AAV particles may be produced by contacting a viral production cell (e.g., an insect cell or a mammalian cell) with at least one viral expression construct encoding at least one capsid protein and at least one payload construct vector. The viral production cell may be contacted by transient transfection, viral transduction, and/or electroporation. The payload construct vector may include a payload construct encoding a payload molecule such as, but not limited to, a transgene, a polynucleotide encoding protein, and a modulatory nucleic acid. The viral production cell can be cultured under conditions such that at least one AAV particle or vector is produced, isolated (e.g., using temperature-induced lysis, mechanical lysis and/or chemical lysis) and/or purified (e.g., using filtration, chromatography, and/or immunoaffinity purification). As a non-limiting example, the payload construct vector may include mammalian DNA.

[0651] In certain embodiments, the AAV particles are produced in an insect cell (e.g., Spodoptera frugiperda (Sf9) cell) using a method described herein. As a non-limiting example, the insect cell is contacted using viral transduction which may include baculoviral transduction.

[0652] In certain embodiments, the AAV particles are produced in an mammalian cell (e.g., HEK293 cell) using a method described herein. As a non-limiting example, the mammalian cell is contacted using viral transduction which may include multiplasmid transient transfection (such as triple plasmid transient transfection).

[0653] In certain embodiments, the AAV particle production method described herein produces greater than 101, greater than 102, greater than 103, greater than 104, or greater than 105 AAV particles in a viral production cell.

[0654] In certain embodiments, a process of the present disclosure includes production of viral particles in a viral production cell using a viral production system which includes at least one viral expression construct and at least one payload construct. The at least one viral expression construct and at least one payload construct can be co-transfected (e.g. dual transfection, triple transfection) into a viral production cell. The transfection is completed using standard molecular biology techniques known and routinely performed by a person skilled in the art. The viral production cell provides the cellular machinery necessary for expression of the proteins and other biomaterials necessary for producing the AAV particles, including Rep proteins which replicate the payload construct and Cap proteins which assemble to form a capsid that encloses the replicated payload constructs. The resulting AAV particle is extracted from the viral production cells and processed into a pharmaceutical preparation for administration.

[0655] In various embodiments, once administered, an AAV particle disclosed herein may, without being bound by theory, contact a target cell and enter the cell, e.g., in an endosome. The AAV particles, e.g., those released from the endosome, may subsequently contact the nucleus of the target cell to deliver the payload construct. The payload construct, e.g. recombinant viral construct, may be delivered to the nucleus of the target cell wherein the payload molecule encoded by the payload construct may be expressed.

[0656] In certain embodiments, the process for production of viral particles utilizes seed cultures of viral production cells that include one or more baculoviruses (e.g., a Baculoviral Expression Vector (BEV) or a baculovirus infected insect cell (BIIC) that has been transfected with a viral expression construct and a payload construct vector). In certain embodiments, the seed cultures are harvested, divided into aliquots and frozen, and may be used at a later time point to initiate an infection of a naïve population of production cells.

[0657] In some embodiments, large scale production of AAV particles utilizes a bioreactor. Without being bound by theory, the use of a bioreactor may allow for the precise measurement and/or control of variables that support the growth and activity of viral production cells such as mass, temperature, mixing conditions (impellor RPM or wave oscillation), CO₂ concentration, O₂ concentration, gas sparge rates and volumes, gas overlay rates and volumes, pH, Viable Cell Density (VCD), cell viability, cell diameter, and/or optical density (OD). In certain embodiments, the bioreactor is used for batch production in which the entire culture is harvested at an experimentally determined time point and AAV particles are purified. In some embodiments, the bioreactor is used for continuous production in which a portion of the culture is harvested at an experimentally determined time point for purification of AAV particles, and the remaining culture in the bioreactor is refreshed with additional growth media components.

[0658] In various embodiments, AAV viral particles can be extracted from viral production cells in a process which includes cell lysis, clarification, sterilization and purification. Cell lysis includes any process that disrupts the structure of the viral production cell, thereby releasing AAV particles. In certain embodiments, cell lysis may include thermal shock, chemical, or mechanical lysis methods. Clarification can include the gross purification of the mixture of lysed cells, media components, and AAV particles. In certain embodiments, clarification includes centrifugation and/or filtration, including but not limited to depth end, tangential flow, and/or hollow fiber filtration.

[0659] In various embodiments, the end result of viral production is a purified collection of AAV particles which include two components: (1) a payload construct (e.g. a recombinant AAV vector genome construct) and (2) a viral capsid.

[0660] In certain embodiments, a viral production system or process of the present disclosure includes steps for producing baculovirus infected insect cells (BIICs) using Viral Production Cells (VPC) and plasmid constructs. Viral Production Cells (VPCs) from a Cell Bank (CB) are thawed and expanded to provide a target working volume and VPC concentration. The resulting pool of VPCs is split into a Rep/Cap VPC pool and a Payload VPC pool. One or more Rep/Cap plasmid constructs (viral expression constructs) are processed into Rep/Cap Bacmid polynucleotides and transfected into the Rep/Cap VPC pool. One or more Payload plasmid constructs (payload constructs) are processed into Payload Bacmid polynucleotides and transfected into the Payload VPC pool. The two VPC pools are incubated to produce P1 Rep/Cap Baculoviral Expression Vectors (BEVs) and P1 Payload BEVs. The two BEV pools are expanded into a collection of Plaques, with a single Plaque being selected for Clonal Plaque (CP) Purification (also referred to as Single Plaque Expansion). The process can include a single CP Purification step or can include multiple CP Purification steps either in series or separated by other processing steps. The one-or-more CP Purification steps provide a CP Rep/Cap BEV pool and a CP Payload BEV pool. These two BEV pools can then be stored and used for future production steps, or they can be then transfected into VPCs to produce a Rep/Cap BIIC pool and a Payload BIIC pool.

[0661] In certain embodiments, a viral production system or process of the present disclosure includes steps for producing AAV particles using Viral Production Cells (VPC) and baculovirus infected insect cells (BIICs). Viral Production Cells (VPCs) from a Cell Bank (CB) are thawed and expanded to provide a target working volume and VPC concentration. The working volume of Viral Production Cells is seeded into a Production Bioreactor and can be further expanded to a working volume of 200-2000 L with a target VPC concentration for BIIC infection. The working volume of VPCs in the Production Bioreactor is then co-infected with Rep/Cap BIICs and Payload BIICs, with a target VPC: BIIC ratio and a target BIIC: BIIC ratio. VCD infection can also utilize BEVs. The co-infected VPCs are incubated and expanded in the Production Bioreactor to produce a bulk harvest of AAV particles and VPCs.

### Viral Expression Constructs

[0662] In various embodiments, the viral production system of the present disclosure includes one or more viral expression constructs that can be transfected/transduced into a viral production cell. In certain embodiments, a viral expression construct or a payload construct of the present disclosure can be a bacmid, also known as a baculovirus plasmid or recombinant baculovirus genome. In certain embodiments, the viral expression includes a protein-coding nucleotide sequence and at least one expression control sequence for expression in a viral production cell. In certain embodiments, the viral expression includes a protein-coding nucleotide sequence operably linked to least one expression control sequence for expression in a viral production cell. In certain embodiments, the viral expression construct contains parvoviral genes under control of one or more promoters. Parvoviral genes can include nucleotide sequences encoding non-structural AAV replication proteins, such as Rep genes which encode Rep52, Rep40, Rep68, or Rep78 proteins. Parvoviral genes can include nucleotide sequences encoding structural AAV proteins, such as Cap genes which encode VP1, VP2, and VP3 proteins.

[0663] Viral expression constructs of the present disclosure may include any compound or formulation, biological or chemical, which facilitates transformation, transfection, or transduction of a cell with a nucleic acid. Exemplary biological viral expression constructs include plasmids, linear nucleic acid molecules, and recombinant viruses including baculovirus. Exemplary chemical vectors include lipid complexes. Viral expression constructs are used to incorporate nucleic acid sequences into virus replication cells in accordance with the present disclosure. (O'Reilly, David R., Lois K. Miller, and Verne A. Luckow. Baculovirus expression vectors: a laboratory manual. Oxford University Press, 1994); Maniatis et al., eds. Molecular Cloning. CSH Laboratory, NY, N.Y. (1982); and, Philiport and Scluber, eds. Liposomes as tools in Basic Research and Industry. CRC Press, Ann Arbor, Mich. (1995), the contents of each of which are herein incorporated by reference in their entirety as related to viral expression constructs and uses thereof.

[0664] In certain embodiments, the viral expression construct is an AAV expression construct which includes one or more nucleotide sequences encoding non-structural AAV replication proteins, structural AAV capsid proteins, or a combination thereof.

[0665] In certain embodiments, the viral expression construct of the present disclosure may be a plasmid vector. In certain embodiments, the viral expression construct of the present disclosure may be a baculoviral construct.

[0666] The present disclosure is not limited by the number of viral expression constructs employed to produce AAV particles or viral vectors. In certain embodiments, one, two, three, four, five, six, or more viral expression constructs can be employed to produce AAV particles in viral production cells in accordance with the present disclosure. In certain embodiments of the present disclosure, a viral expression construct may be used for the production of an AAV particles in insect cells. In certain embodiments, modifications may be made to the wild type AAV sequences of the capsid and/or rep genes, for example to improve attributes of the viral particle, such as increased infectivity or specificity, or to enhance production yields.

[0667] In certain embodiments, the viral expression construct may contain a nucleotide sequence which includes start codon region, such as a sequence encoding AAV capsid proteins which include one or more start codon regions. In certain embodiments, the start codon region can be within an expression control sequence. The start codon can be ATG or a non-ATG codon (i.e., a suboptimal start codon where the start codon of the AAV VP1 capsid protein is a non-ATG).

[0668] In certain embodiments, the viral expression construct used for AAV production may contain a nucleotide sequence encoding the AAV capsid proteins where the initiation codon of the AAV VP1 capsid protein is a non-ATG, i.e., a suboptimal initiation codon, allowing the expression of a modified ratio of the viral capsid proteins in the production system, to provide improved infectivity of the host cell. In a non-limiting example, a viral construct vector may contain a nucleic acid construct comprising a nucleotide sequence encoding AAV VP1, VP2, and VP3 capsid proteins, wherein the initiation codon for translation of the AAV VP1 capsid protein is CTG, TTG, or GTG, as described in U.S. Pat. No. 8,163,543, the contents of which are herein incorporated by reference in their entirety as related to AAV capsid proteins and the production thereof.

[0669] In certain embodiments, the viral expression construct of the present disclosure may be a plasmid vector or a baculoviral construct that encodes the parvoviral rep proteins for expression in insect cells. In certain embodiments, a single coding sequence is used for the Rep78 and Rep52 proteins, wherein start codon for translation of the Rep78 protein is a suboptimal start codon, selected from the group consisting of ACG, TTG, CTG, and GTG, that effects partial exon skipping upon expression in insect cells, as described in U.S. Pat. No. 8,512,981, the contents of which are herein incorporated by reference in their entirety, for example to promote less abundant expression of Rep78 as compared to Rep52, which may promote high vector yields.

[0670] In certain embodiments, a VP-coding region encodes one or more AAV capsid proteins of a specific AAV serotype. The AAV serotypes for VP-coding regions can be the same or different. In certain embodiments, a VP-coding region can be codon optimized. In certain embodiments, a VP-coding region or nucleotide sequence can be codon optimized for a mammal cell. In certain embodiments, a VP-coding region or nucleotide sequence can be codon optimized for an insect cell. In certain embodiments, a VP-coding region or nucleotide sequence can be codon optimized for a Spodoptera frugiperda cell. In certain embodiments, a VP-coding region or nucleotide sequence can be codon optimized for Sf9 or Sf21 cell lines.

[0671] In certain embodiments, a nucleotide sequence encoding one or more VP capsid proteins can be codon optimized to have a nucleotide homology with the reference nucleotide sequence of less than 100%. In certain embodiments, the nucleotide homology between the codon-optimized VP nucleotide sequence and the reference VP nucleotide sequence is less than 100%, less than 99%, less than 98%, less than 97%, less than 96%, less than 95%, less than 94%, less than 93%, less than 92%, less than 91%, less than 90%, less than 89%, less than 88%, less than 87%, less than 86%, less than 85%, less than 84%, less than 83%, less than 82%, less than 81%, less than 80%, less than 78%, less than 76%, less than 74%, less than 72%, less than 70%, less than 68%, less than 66%, less than 64%, less than 62%, less than 60%, less than 55%, less than 50%, and less than 40%.

[0672] In certain embodiments, a viral expression construct or a payload construct of the present disclosure can be a bacmid, also known as a baculovirus plasmid or recombinant baculovirus genome. In certain embodiments, a viral expression construct or a payload construct of the present disclosure (e.g. bacmid) can include a polynucleotide incorporated by homologous recombination (transposon donor/acceptor system) into the bacmid by standard molecular biology techniques known and performed by a person skilled in the art.

[0673] In certain embodiments, the polynucleotide incorporated into the bacmid (i.e. polynucleotide insert) can include an expression control sequence operably linked to a protein-coding nucleotide sequence. In certain embodiments, the polynucleotide incorporated into the bacmid can include an expression control sequence which includes a promoter, such as p10 or polh, and which is operably linked to a nucleotide sequence which encodes a structural AAV capsid protein (e.g. VP1, VP2, VP3 or a combination thereof). In certain embodiments, the polynucleotide incorporated into the bacmid can include an expression control sequence which includes a promoter, such as p10 or polh, and which is operably linked to a nucleotide sequence which encodes a non-structural AAV capsid protein (e.g. Rep78, Rep52, or a combination thereof).

[0674] The method of the present disclosure is not limited by the use of specific expression control sequences. However, when a certain stoichiometry of VP products are achieved (close to 1:1:10 for VP1, VP2, and VP3, respectively) and also when the levels of Rep52 or Rep40 (also referred to as the p19 Reps) are significantly higher than Rep78 or Rep68 (also referred to as the p5 Reps), improved yields of AAV in production cells (such as insect cells) may be obtained. In certain embodiments, the p5/p19 ratio is below 0.6 more, below 0.4, or below 0.3, but always at least 0.03. These ratios can be measured at the level of the protein or can be implicated from the relative levels of specific mRNAs.

[0675] In certain embodiments, AAV particles are produced in viral production cells (such as mammalian or insect cells) wherein all three VP proteins are expressed at a stoichiometry approaching, about or which is: 1:1:10 (VP1:VP2:VP3); 2:2:10 (VP1:VP2:VP3); 2:0:10 (VP1:VP2:VP3); 1-2:0-2:10 (VP1:VP2:VP3); 1-2:1-2:10 (VP1:VP2:VP3); 2-3:0-3:10 (VP1:VP2:VP3); 2-3:2-3:10 (VP1:VP2:VP3); 3:3:10 (VP1:VP2:VP3); 3-5:0-5:10 (VP1:VP2:VP3); or 3-5:3-5:10 (VP1:VP2:VP3).

[0676] In certain embodiments, the expression control regions are engineered to produce a VP1:VP2:VP3 ratio selected from the group consisting of: about or exactly 1:0:10; about or exactly 1:1:10; about or exactly 2:1:10; about or exactly 2:1:10; about or exactly 2:2:10; about or exactly 3:0:10; about or exactly 3:1:10; about or exactly 3:2:10; about or exactly 3:3:10; about or exactly 4:0:10; about or exactly 4:1:10; about or exactly 4:2:10; about or exactly 4:3:10; about or exactly 4:4:10; about or exactly 5:5:10; about or exactly 1-2:0-2:10; about or exactly 1-2:1-2:10; about or exactly 1-3:0-3:10; about or exactly 1-3:1-3:10; about or exactly 1-4:0-4:10; about or exactly 1-4:1-4:10; about or exactly 1-5:1-5:10; about or exactly 2-3:0-3:10; about or exactly 2-3:2-3:10; about or exactly 2-4:2-4:10; about or exactly 2-5:2-5:10; about or exactly 3-4:3-4:10; about or exactly 3-5:3-5:10; and about or exactly 4-5:4-5:10.

[0677] In certain embodiments of the present disclosure, Rep52 or Rep78 is transcribed from the baculoviral derived polyhedron promoter (polh). Rep52 or Rep78 can also be transcribed from a weaker promoter, for example a deletion mutant of the ie-1 promoter, the Aie-1 promoter, has about 20% of the transcriptional activity of that ie-1 promoter. A promoter substantially homologous to the Aie-1 promoter may be used. In respect to promoters, a homology of at least 50%, 60%, 70%, 80%, 90% or more, is considered to be a substantially homologous promoter.

### Mammalian Cells

[0678] Viral production of the present disclosure disclosed herein describes processes and methods for producing AAV particles or viral vector that contacts a target cell to deliver a payload construct, e.g. a recombinant AAV particle or viral construct, which includes a nucleotide encoding a payload molecule. The viral production cell may be selected from any biological organism, including prokaryotic (e.g., bacterial) cells, and eukaryotic cells, including, insect cells, yeast cells and mammalian cells.

[0679] In certain embodiments, the AAV particles of the present disclosure may be produced in a viral production cell that includes a mammalian cell. Viral production cells may comprise mammalian cells such as A549, WEH1, 3T3, 10T1/2, BHK, MDCK, COS 1, COS 7, BSC 1, BSC 40, BMT 10, VERO, W138, HeLa, HEK293, HEK293T (293T), Saos, C2C12, L cells, HT1080, Huh7, HepG2, C127, 3T3, CHO, HeLa cells, KB cells, BHK and primary fibroblast, hepatocyte, and myoblast cells derived from mammals. Viral production cells can include cells derived from any mammalian species including, but not limited to, human, monkey, mouse, rat, rabbit, and hamster or cell type, including but not limited to fibroblast, hepatocyte, tumor cell, cell line transformed cell, etc.

[0680] AAV viral production cells commonly used for production of recombinant AAV particles include, but is not limited to other mammalian cell lines as described in U.S. Pat. Nos. 6,156,303, 5,387,484, 5,741,683, 5,691,176, 6,428,988 and 5,688,676; U.S. patent application 2002/0081721, and International Patent Publication Nos. WO 00/47757, WO 00/24916, and WO 96/17947, the contents of each of which are herein incorporated by reference in their entireties insofar as they do no conflict with the present disclosure. In certain embodiments, the AAV viral production cells are trans-complementing packaging cell lines that provide functions deleted from a replication-defective helper virus, e.g., HEK293 cells or other Ea trans-complementing cells.

[0681] In certain embodiments, the packaging cell line 293-10-3 (ATCC Accession No. PTA-2361) may be used to produce the AAV particles, as described in U.S. Pat. No. 6,281,010, the contents of which are herein incorporated by reference in their entirety as related to the 293-10-3 packaging cell line and uses thereof.

[0682] In certain embodiments, of the present disclosure a cell line, such as a HeLA cell line, for trans-complementing E1 deleted adenoviral vectors, which encoding adenovirus Ela and adenovirus E1b under the control of a phosphoglycerate kinase (PGK) promoter can be used for AAV particle production as described in U.S. Pat. No. 6,365,394, the contents of which are incorporated herein by reference in their entirety as related to the HeLa cell line and uses thereof.

[0683] In certain embodiments, AAV particles are produced in mammalian cells using a multiplasmid transient transfection method (such as triple plasmid transient transfection). In certain embodiments, the multiplasmid transient transfection method includes transfection of the following three different constructs: (i) a payload construct, (ii) a Rep/Cap construct (parvoviral Rep and parvoviral Cap), and (iii) a helper construct. In certain embodiments, the triple transfection method of the three components of AAV particle production may be utilized to produce small lots of virus for assays including transduction efficiency, target tissue (tropism) evaluation, and stability. In certain embodiments, the triple transfection method of the three components of AAV particle production may be utilized to produce large lots of materials for clinical or commercial applications.

[0684] AAV particles to be formulated may be produced by triple transfection or baculovirus mediated virus production, or any other method known in the art. Any suitable permissive or packaging cell known in the art may be employed to produce the vectors. In certain embodiments, trans-complementing packaging cell lines are used that provide functions deleted from a replication-defective helper virus, e.g., 293 cells or other Ela trans-complementing cells.

[0685] The gene cassette may contain some or all of the parvovirus (e.g., AAV) cap and rep genes. In certain embodiments, some or all of the cap and rep functions are provided in trans by introducing a packaging vector(s) encoding the capsid and/or Rep proteins into the cell. In certain embodiments, the gene cassette does not encode the capsid or Rep proteins. Alternatively, a packaging cell line is used that is stably transformed to express the cap and/or rep genes.

[0686] Recombinant AAV virus particles are, in certain embodiments, produced and purified from culture supernatants according to the procedure as described in US2016/0032254, the contents of which are incorporated by reference in their entirety as related to the production and processing of recombinant AAV virus particles. Production may also involve methods known in the art including those using 293T cells, triple transfection or any suitable production method.

[0687] In certain embodiments, mammalian viral production cells (e.g. 293T cells) can be in an adhesion/adherent state (e.g. with calcium phosphate) or a suspension state (e.g. with polyethyleneimine (PEI)). The mammalian viral production cell is transfected with plasmids required for production of AAV, (i.e., AAV rep/cap construct, an adenoviral helper construct, and/or ITR flanked payload construct). In certain embodiments, the transfection process can include optional medium changes (e.g. medium changes for cells in adhesion form, no medium changes for cells in suspension form, medium changes for cells in suspension form if desired). In certain embodiments, the transfection process can include transfection mediums such as DMEM or F17. In certain embodiments, the transfection medium can include serum or can be serum-free (e.g. cells in adhesion state with calcium phosphate and with serum, cells in suspension state with PEI and without serum).

[0688] Cells can subsequently be collected by scraping (adherent form) and/or pelleting (suspension form and scraped adherent form) and transferred into a receptacle. Collection steps can be repeated as necessary for full collection of produced cells. Next, cell lysis can be achieved by consecutive freeze-thaw cycles (−80 C to 37 C), chemical lysis (such as adding detergent triton), mechanical lysis, or by allowing the cell culture to degrade after reaching ~0% viability. Cellular debris is removed by centrifugation and/or depth filtration. The samples are quantified for AAV particles by DNase resistant genome titration by DNA qPCR.

[0689] AAV particle titers are measured according to genome copy number (genome particles per milliliter). Genome particle concentrations are based on DNA qPCR of the vector DNA as previously reported (Clark et al. (1999) Hum. Gene Ther., 10:1031-1039; Veldwijk et al. (2002) Mol. Ther., 6:272-278, the contents of which are each incorporated by reference in their entireties as related to the measurement of particle concentrations).

### Insect Cells

[0690] Viral production of the present disclosure includes processes and methods for producing AAV particles or viral vectors that contact a target cell to deliver a payload construct, e.g., a recombinant viral construct, which includes a nucleotide encoding a payload molecule. In certain embodiments, the AAV particles or viral vectors of the present disclosure may be produced in a viral production cell that includes an insect cell.

[0691] Growing conditions for insect cells in culture, and production of heterologous products in insect cells in culture are well-known in the art, see U.S. Pat. No. 6,204,059, the contents of which are herein incorporated by reference in their entirety as related to the growth and use of insect cells in viral production.

[0692] Any insect cell which allows for replication of parvovirus and which can be maintained in culture can be used in accordance with the present disclosure. AAV viral production cells commonly used for production of recombinant AAV particles include, but is not limited to, Spodoptera frugiperda, including, but not limited to the Sf9 or Sf21 cell lines, Drosophila cell lines, or mosquito cell lines, such as Aedes albopictus derived cell lines. Use of insect cells for expression of heterologous proteins is well documented, as are methods of introducing nucleic acids, such as vectors, e.g., insect-cell compatible vectors, into such cells and methods of maintaining such cells in culture. See, for example, Methods in Molecular Biology, ed. Richard, Humana Press, NJ (1995); O'Reilly et al., Baculovirus Expression Vectors, A Laboratory Manual, Oxford Univ. Press (1994); Samulski et al., J. Vir.63:3822-8 (1989); Kajigaya et al., Proc. Nat'l. Acad. Sci. USA 88:4646-50 (1991); Ruffing et al., J. Vir. 66:6922-30 (1992); Kimbauer et al., Vir.219:37-44 (1996); Zhao et al., Vir.272:382-93 (2000); and Samulski et al., U.S. Pat. No. 6,204,059, the contents of each of which are herein incorporated by reference in their entirety as related to the use of insect cells in viral production.

[0693] In some embodiments, the AAV particles are made using the methods described in WO2015/191508, the contents of which are herein incorporated by reference in their entirety insofar as they do not conflict with the present disclosure.

[0694] In certain embodiments, insect host cell systems, in combination with baculoviral systems (e.g., as described by Luckow et al., Bio/Technology 6:47 (1988)) may be used. In certain embodiments, an expression system for preparing chimeric peptide is Trichoplusia ni, Tn 5B1-4 insect cells/baculoviral system, which can be used for high levels of proteins, as described in U.S. Pat. No. 6,660,521, the contents of which are herein incorporated by reference in their entirety as related to the production of viral particles.

[0695] Expansion, culturing, transfection, infection and storage of insect cells can be carried out in any cell culture media, cell transfection media or storage media known in the art, including Hyclone™ SFX-Insect™ Cell Culture Media, Expression System ESF AF™ Insect Cell Culture Medium, ThermoFisher Sf-900II™ media, ThermoFisher Sf-900III™ media, or ThermoFisher Grace's Insect Media. Insect cell mixtures of the present disclosure can also include any of the formulation additives or elements described in the present disclosure, including (but not limited to) salts, acids, bases, buffers, surfactants (such as Poloxamer 188/Pluronic F-68), and other known culture media elements. Formulation additives can be incorporated gradually or as “spikes” (incorporation of large volumes in a short time).

### Baculovirus-Production Systems

[0696] In certain embodiments, processes of the present disclosure can include production of AAV particles or viral vectors in a baculoviral system using a viral expression construct and a payload construct vector. In certain embodiments, the baculoviral system includes Baculovirus expression vectors (BEVs) and/or baculovirus infected insect cells (BIICs). In certain embodiments, a viral expression construct or a payload construct of the present disclosure can be a bacmid, also known as a baculovirus plasmid or recombinant baculovirus genome. In certain embodiments, a viral expression construct or a payload construct of the present disclosure can be polynucleotide incorporated by homologous recombination (transposon donor/acceptor system) into a bacmid by standard molecular biology techniques known and performed by a person skilled in the art. Transfection of separate viral replication cell populations produces two or more groups (e.g. two, three) of baculoviruses (BEVs), one or more group which can include the viral expression construct (Expression BEV), and one or more group which can include the payload construct (Payload BEV). The baculoviruses may be used to infect a viral production cell for production of AAV particles or viral vector.

[0697] In certain embodiments, the process includes transfection of a single viral replication cell population to produce a single baculovirus (BEV) group which includes both the viral expression construct and the payload construct. These baculoviruses may be used to infect a viral production cell for production of AAV particles or viral vector.

[0698] In certain embodiments, BEVs are produced using a Bacmid Transfection agent, such as Promega FuGENE® HD, WFI water, or ThermoFisher Cellfectin® II Reagent. In certain embodiments, BEVs are produced and expanded in viral production cells, such as an insect cell.

[0699] In certain embodiments, the method utilizes seed cultures of viral production cells that include one or more BEVs, including baculovirus infected insect cells (BIICs). The seed BIICs have been transfected/transduced/infected with an Expression BEV which includes a viral expression construct, and also a Payload BEV which includes a payload construct. In certain embodiments, the seed cultures are harvested, divided into aliquots and frozen, and may be used at a later time to initiate transfection/transduction/infection of a naïve population of production cells. In certain embodiments, a bank of seed BIICs is stored at −80° C. or in LN2 vapor.

[0700] Baculoviruses are made of several essential proteins which are essential for the function and replication of the Baculovirus, such as replication proteins, envelope proteins and capsid proteins. The Baculovirus genome thus includes several essential-gene nucleotide sequences encoding the essential proteins. As a non-limiting example, the genome can include an essential-gene region which includes an essential-gene nucleotide sequence encoding an essential protein for the Baculovirus construct. The essential protein can include: GP64 baculovirus envelope protein, VP39 baculovirus capsid protein, or other similar essential proteins for the Baculovirus construct.

[0701] Baculovirus expression vectors (BEV) for producing AAV particles in insect cells, including but not limited to Spodoptera frugiperda (Sf9) cells, provide high titers of viral vector product. Recombinant baculovirus encoding the viral expression construct and payload construct initiates a productive infection of viral vector replicating cells. Infectious baculovirus particles released from the primary infection secondarily infect additional cells in the culture, exponentially infecting the entire cell culture population in a number of infection cycles that is a function of the initial multiplicity of infection, see Urabe, M. et al. J Virol. 2006 February; 80 (4): 1874-85, the contents of which are herein incorporated by reference in their entirety as related to the production and use of BEVs and viral particles.

[0702] Production of AAV particles with baculovirus in an insect cell system may address known baculovirus genetic and physical instability.

[0703] In certain embodiments, the production system of the present disclosure addresses baculovirus instability over multiple passages by utilizing a titerless infected-cells preservation and scale-up system. Small scale seed cultures of viral producing cells are transfected with viral expression constructs encoding the structural and/or non-structural components of the AAV particles. Baculovirus-infected viral producing cells are harvested into aliquots that may be cryopreserved in liquid nitrogen; the aliquots retain viability and infectivity for infection of large scale viral producing cell culture. Wasilko D J et al. Protein Expr Purif. 2009 June; 65 (2): 122-32, the contents of which are herein incorporated by reference in their entirety as related to the production and use of BEVs and viral particles.

[0704] A genetically stable baculovirus may be used to produce a source of the one or more of the components for producing AAV particles in invertebrate cells. In certain embodiments, defective baculovirus expression vectors may be maintained episomally in insect cells. In such embodiments, the corresponding bacmid vector is engineered with replication control elements, including but not limited to promoters, enhancers, and/or cell-cycle regulated replication elements.

[0705] In certain embodiments, stable viral producing cells permissive for baculovirus infection are engineered with at least one stable integrated copy of any of the elements necessary for AAV replication and vector production including, but not limited to, the entire AAV genome, Rep and Cap genes, Rep genes, Cap genes, each Rep protein as a separate transcription cassette, each VP protein as a separate transcription cassette, the AAP (assembly activation protein), or at least one of the baculovirus helper genes with native or non-native promoters.

[0706] In some embodiments, the AAV particle of the present disclosure may be produced in insect cells (e.g., Sf9 cells).

[0707] In some embodiments, the AAV particle of the present disclosure may be produced using triple transfection.

[0708] In some embodiments, the AAV particle of the present disclosure may be produced in mammalian cells.

[0709] In some embodiments, the AAV particle of the present disclosure may be produced by triple transfection in mammalian cells.

[0710] In some embodiments, the AAV particle of the present disclosure may be produced by triple transfection in HEK293 cells.

[0711] The AAV viral genomes encoding GCase protein described herein may be useful in the fields of human disease, veterinary applications and a variety of in vivo and in vitro settings. The AAV particles of the present disclosure may be useful in the field of medicine for the treatment, prophylaxis, palliation, or amelioration of neurological or neuromuscular diseases and/or disorders. In some embodiments, the AAV particles of the disclosure are used for the prevention and/or treatment of GBA1-related disorders.

[0712] Various embodiments of the disclosure herein provide a pharmaceutical composition comprising the AAV particle described herein and a pharmaceutically acceptable excipient.

[0713] Various embodiments of the disclosure herein provide a method of treating a subject in need thereof comprising administering to the subject a therapeutically effective amount of the pharmaceutical composition described herein.

[0714] Certain embodiments of the method provide that the subject is treated by a route of administration of the pharmaceutical composition selected from the group consisting of: intravenous, intracerebroventricular, intraparenchymal, intrathecal, subpial, and intramuscular, or a combination thereof. Certain embodiments of the method provide that the subject is treated for GBA1-related disorders and/or other neurological disorder arising from a deficiency in the quantity or function of GBA1 gene products. In one aspect of the method, a pathological feature of the GBA1-related disorders or the other neurological disorder is alleviated and/or the progression of the GBA1-related disorders or the other neurological disorder is halted, slowed, ameliorated, or reversed.

[0715] Various embodiments of the disclosure herein describe a method of increasing the level of GCase protein in the central nervous system of a subject in need thereof comprising administering to said subject via infusion, an effective amount of the pharmaceutical composition described herein.

[0716] Also described herein are compositions, methods, processes, kits and devices for the design, preparation, manufacture and/or formulation of AAV particles. In some embodiments, payloads, such as but not limited to payloads comprising GCase protein, may be encoded by payload constructs or contained within plasmids or vectors or recombinant adeno-associated viruses (AAVs).

[0717] The present disclosure also provides administration and/or delivery methods for vectors and viral particles, e.g., AAV particles, for the treatment or amelioration of GBA1-related disorders. Such methods may involve gene replacement or gene activation. Such outcomes are achieved by utilizing the methods and compositions taught herein.

### III. Pharmaceutical Compositions

[0718] The present disclosure additionally provides a method for treating GBA1-related disorders and disorders related to deficiencies in the function or expression of GCase protein(s) in a mammalian subject, including a human subject, comprising administering to the subject any of the AAV polynucleotides or AAV genomes described herein (e.g., “vector genomes,” “viral genomes,” or “VGs”) or administering to the subject a particle comprising said AAV polynucleotide or AAV genome, or administering to the subject any of the described compositions, including pharmaceutical compositions.

[0719] As used herein the term “composition” comprises an AAV polynucleotide or AAV genome or AAV particle and at least one excipient.

[0720] As used herein the term “pharmaceutical composition” comprises an AAV polynucleotide or AAV genome or AAV particle and one or more pharmaceutically acceptable excipients.

[0721] Although the descriptions of pharmaceutical compositions, e.g., AAV comprising a payload encoding a GCase protein to be delivered, provided herein are principally directed to pharmaceutical compositions which are suitable for administration to humans, it will be understood by the skilled artisan that such compositions are generally suitable for administration to any other animal, e.g., to non-human animals, e.g. non-human mammals. Modification of pharmaceutical compositions suitable for administration to humans in order to render the compositions suitable for administration to various animals is well understood, and the ordinarily skilled veterinary pharmacologist can design and/or perform such modification with merely ordinary, if any, experimentation. Subjects to which administration of the pharmaceutical compositions is contemplated include, but are not limited to, humans and/or other primates; mammals, including commercially relevant mammals such as cattle, pigs, horses, sheep, cats, dogs, mice, and/or rats; and/or birds, including commercially relevant birds such as poultry, chickens, ducks, geese, and/or turkeys.

[0722] In some embodiments, compositions are administered to humans, human patients, or subjects.

[0723] In some embodiments, the AAV particle formulations described herein may contain a nucleic acid encoding at least one payload. In some embodiments, the formulations may contain a nucleic acid encoding 1, 2, 3, 4, or 5 payloads. In some embodiments, the formulation may contain a nucleic acid encoding a payload construct encoding proteins selected from categories such as, but not limited to, human proteins, veterinary proteins, bacterial proteins, biological proteins, antibodies, immunogenic proteins, therapeutic peptides and proteins, secreted proteins, plasma membrane proteins, cytoplasmic proteins, cytoskeletal proteins, intracellular membrane bound proteins, nuclear proteins, proteins associated with human disease, and/or proteins associated with non-human diseases. In some embodiments, the formulation contains at least three payload constructs encoding proteins. Certain embodiments provide that at least one of the payloads is GCase protein or a variant thereof.

[0724] A pharmaceutical composition in accordance with the present disclosure may be prepared, packaged, and/or sold in bulk, as a single unit dose, and/or as a plurality of single unit doses. As used herein, a “unit dose” refers to a discrete amount of the pharmaceutical composition comprising a predetermined amount of the active ingredient. The amount of the active ingredient is generally equal to the dosage of the active ingredient which would be administered to a subject and/or a convenient fraction of such a dosage such as, for example, one-half or one-third of such a dosage.

### IV. Formulations

[0725] Formulations of the AAV pharmaceutical compositions described herein may be prepared by any method known or hereafter developed in the art of pharmacology. In general, such preparatory methods include the step of bringing the active ingredient into association with an excipient and/or one or more other accessory ingredients, and then, if necessary and/or desirable, dividing, shaping and/or packaging the product into a desired single- or multi-dose unit.

[0726] Relative amounts of the active ingredient, the pharmaceutically acceptable excipient, and/or any additional ingredients in a pharmaceutical composition in accordance with the disclosure will vary, depending upon the identity, size, and/or condition of the subject treated and further depending upon the route by which the composition is to be administered.

[0727] For example, the composition may comprise between 0.1% and 99% (w/w) of the active ingredient. By way of example, the composition may comprise between 0.1% and 100%, e.g., between 0.5% and 50%, between 1-30%, between 5-80%, or at least 80% (w/w) active ingredient.

[0728] The AAV particles of the disclosure can be formulated using one or more excipients to: (1) increase stability; (2) increase cell transfection or transduction; (3) permit the sustained or delayed release; (4) alter the biodistribution (e.g., target the viral particle to specific tissues or cell types); (5) increase the translation of encoded protein in vivo; (6) alter the release profile of encoded protein in vivo and/or (7) allow for regulatable expression of the payload.

[0729] Formulations of the present disclosure can include, without limitation, saline, lipidoids, liposomes, lipid nanoparticles, polymers, lipoplexes, core-shell nanoparticles, peptides, proteins, cells transfected with viral vectors (e.g., for transplantation into a subject), nanoparticle mimics and combinations thereof. Further, the viral vectors of the present disclosure may be formulated using self-assembled nucleic acid nanoparticles.

[0730] In some embodiments, the viral vectors encoding GCase protein may be formulated to optimize baricity and/or osmolality. In some embodiments, the baricity and/or osmolality of the formulation may be optimized to ensure optimal drug distribution in the central nervous system or a region or component of the central nervous system.

[0731] In some embodiments, the AAV particles of the disclosure may be formulated in PBS with 0.001% of pluronic acid (F-68) at a pH of about 7.0.

[0732] In some embodiments, the AAV particles of the disclosure may be formulated in PBS, in combination with an ethylene oxide/propylene oxide copolymer (also known as pluronic or poloxamer).

[0733] In some embodiments, the AAV particles of the disclosure may be formulated in PBS with 0.001% pluronic acid (F-68) (poloxamer 188) at a pH of about 7.0.

[0734] In some embodiments, the AAV particles of the disclosure may be formulated in PBS with 0.001% pluronic acid (F-68) (poloxamer 188) at a pH of about 7.3.

[0735] In some embodiments, the AAV particles of the disclosure may be formulated in PBS with 0.001% pluronic acid (F-68) (poloxamer 188) at a pH of about 7.4.

[0736] In some embodiments, the AAV particles of the disclosure may be formulated in a solution comprising sodium chloride, sodium phosphate and an ethylene oxide/propylene oxide copolymer.

[0737] In some embodiments, the AAV particles of the disclosure may be formulated in a solution comprising sodium chloride, sodium phosphate dibasic, potassium chloride, potassium phosphate monobasic, and poloxamer 188/pluronic acid (F-68).

[0738] In some embodiments, the AAV particles of the disclosure may be formulated in a solution comprising 192 mM sodium chloride, 10 mM sodium phosphate (dibasic), 2.7 mM potassium chloride, 2 mM potassium phosphate (monobasic) and 0.001% pluronic F-68 (v/v), at pH 7.4. This formulation is referred to as Formulation 1 in the present disclosure.

[0739] In some embodiments, the AAV particles of the disclosure may be formulated in a solution comprising about 192 mM sodium chloride, about 10 mM sodium phosphate dibasic and about 0.001% poloxamer 188, at a pH of about 7.3. The concentration of sodium chloride in the final solution may be 150 mM-200 mM. As non-limiting examples, the concentration of sodium chloride in the final solution may be 150 mM, 160 mM, 170 mM, 180 mM, 190 mM or 200 mM. The concentration of sodium phosphate dibasic in the final solution may be 1 mM-50 mM. As non-limiting examples, the concentration of sodium phosphate dibasic in the final solution may be 1 mM, 2 mM, 3 mM, 4 mM, 5 mM, 6 mM, 7 mM, 8 mM, 9 mM, 10 mM, 15 mM, 20 mM, 25 mM, 30 mM, 40 mM, or 50 mM. The concentration of poloxamer 188 (pluronic acid (F-68)) may be 0.0001%-1%. As non-limiting examples, the concentration of poloxamer 188 (pluronic acid (F-68)) may be 0.0001%, 0.0005%, 0.001%, 0.005%, 0.01%, 0.05%, 0.1%, 0.5%, or 1%. The final solution may have a pH of 6.8-7.7. Non-limiting examples for the pH of the final solution include a pH of 6.8, 6.9, 7.0, 7.1, 7.2, 7.3, 7.4, 7.5, 7.6, or 7.7.

[0740] In some embodiments, the AAV particles of the disclosure may be formulated in a solution comprising about 1.05% sodium chloride, about 0.212% sodium phosphate dibasic, heptahydrate, about 0.025% sodium phosphate monobasic, monohydrate, and 0.001% poloxamer 188, at a pH of about 7.4. As a non-limiting example, the concentration of AAV particle in this formulated solution may be about 0.001%. The concentration of sodium chloride in the final solution may be 0.1-2.0%, with non-limiting examples of 0.1%, 0.25%, 0.5%, 0.75%, 0.95%, 0.96%, 0.97%, 0.98%, 0.99%, 1.00%, 1.01%, 1.02%, 1.03%, 1.04%, 1.05%, 1.06%, 1.07%, 1.08%, 1.09%, 1.10%, 1.25%, 1.5%, 1.75%, or 2%. The concentration of sodium phosphate dibasic in the final solution may be 0.100-0.300% with non-limiting examples including 0.100%, 0.125%, 0.150%, 0.175%, 0.200%, 0.210%, 0.211%, 0.212%, 0.213%, 0.214%, 0.215%, 0.225%, 0.250%, 0.275%, 0.300%. The concentration of sodium phosphate monobasic in the final solution may be 0.010-0.050%, with non-limiting examples of 0.010%, 0.015%, 0.020%, 0.021%, 0.022%, 0.023%, 0.024%, 0.025%, 0.026%, 0.027%, 0.028%, 0.029%, 0.030%, 0.035%, 0.040%, 0.045%, or 0.050%. The concentration of poloxamer 188 (pluronic acid (F-68)) may be 0.0001%-1%. As non-limiting examples, the concentration of poloxamer 188 (pluronic acid (F-68)) may be 0.0001%, 0.0005%, 0.001%, 0.005%, 0.01%, 0.05%, 0.1%, 0.5%, or 1%. The final solution may have a pH of 6.8-7.7. Non-limiting examples for the pH of the final solution include a pH of 6.8, 6.9, 7.0, 7.1, 7.2, 7.3, 7.4, 7.5, 7.6, or 7.7.

### Excipients

[0741] The formulations of the disclosure can include one or more excipients, each in an amount that together increases the stability of the AAV particle, increases cell transfection or transduction by the viral particle, increases the expression of viral particle encoded protein, and/or alters the release profile of AAV particle encoded proteins. In some embodiments, a pharmaceutically acceptable excipient may be at least 95%, at least 96%, at least 97%, at least 98%, at least 99%, or 100% pure. In some embodiments, an excipient is approved for use for humans and for veterinary use. In some embodiments, an excipient may be approved by United States Food and Drug Administration. In some embodiments, an excipient may be of pharmaceutical grade. In some embodiments, an excipient may meet the standards of the United States Pharmacopoeia (USP), the European Pharmacopoeia (EP), the British Pharmacopoeia, and/or the International Pharmacopoeia.

[0742] Excipients, which, as used herein, include, but are not limited to, any and all solvents, dispersion media, diluents, or other liquid vehicles, dispersion or suspension aids, surface active agents, isotonic agents, thickening or emulsifying agents, preservatives, and the like, as suited to the particular dosage form desired. Various excipients for formulating pharmaceutical compositions and techniques for preparing the composition are known in the art (see Remington: The Science and Practice of Pharmacy, 21st Edition, A. R. Gennaro, Lippincott, Williams & Wilkins, Baltimore, MD, 2006; the contents of which are herein incorporated by reference in their entirety). The use of a conventional excipient medium may be contemplated within the scope of the present disclosure, except insofar as any conventional excipient medium may be incompatible with a substance or its derivatives, such as by producing any undesirable biological effect or otherwise interacting in a deleterious manner with any other component(s) of the pharmaceutical composition.

### Inactive Ingredients

[0743] In some embodiments, AAV formulations may comprise at least one excipient which is an inactive ingredient. As used herein, the term “inactive ingredient” refers to one or more agents that do not contribute to the activity of the pharmaceutical composition included in formulations. In some embodiments, all, none, or some of the inactive ingredients which may be used in the formulations of the present disclosure may be approved by the US Food and Drug Administration (FDA).

[0744] Formulations of AAV particles disclosed herein may include cations or anions. In some embodiments, the formulations include metal cations such as, but not limited to, Zn²⁺, Ca²⁺, Cu²⁺, Mg⁺, or combinations thereof. In some embodiments, formulations may include polymers or polynucleotides complexed with a metal cation (see, e.g., U.S. Pat. Nos. 6,265,389 and 6,555,525, the contents of each of which are herein incorporated by reference in their entirety).

### V. Uses and Applications

[0745] The compositions of the disclosure may be administered to a subject or used in the manufacture of a medicament for administration to a subject having a deficiency in the quantity or function of GCase protein or having a disease or condition associated with decreased GCase protein expression. As used herein, “associated with decreased GCase protein levels” or “associated with decreased expression” means that one or more symptoms of a disease are caused by lower-than-normal GCase protein levels in a target tissue or in a biofluid such as blood. A disease or condition associated with decreased GCase protein levels or expression may be a disorder of the central nervous system. Also specifically contemplated herein are Parkinson's Disease and related disorders arising from expression of defective GBA1 gene product, e.g., a PD associated with a GBA1 mutation. Such a disease or condition may be a neuromuscular or a neurological disorder or condition. For example, a disease associated with decreased GCase protein levels may be Parkinson's Disease or a related disorder, or may be another neurological or neuromuscular disorder described herein, e.g., a PD associated with one or more GBA1 mutations, Gaucher Disease (GD) (e.g., Type 1 GD, Type 2 GD, or Type 3 GD), dementia with Lewy Bodies (DLB), Gaucher disease (GD), Spinal muscular atrophy (SMA), Multiple System Atrophy (MSA), or Multiple sclerosis (MS).

[0746] The present disclosure addresses the need for new technologies by providing a GBA1 protein-related treatment deliverable by AAV-based compositions and complexes for the treatment of GBA1-related disorders.

[0747] In some embodiments, the disclosure provides an AAV particle or pharmaceutical composition according to any one of the embodiments disclosed herein for treating a GBA1-related disorder, such as PD, GD, or DLB. In some embodiments, the present disclosure provides the pharmaceutical composition or the AAV particle of any one the embodiments disclosed herein for use in a method of treating a disorder as disclosed herein, such as PD, GD, or DLB.

[0748] In some embodiments, the disclosure provides a method for treating Parkinson's Disease (PD) or a related disease, e.g., PD with one or more mutations in a GBA1 gene. In certain embodiments, the AAV particles encoding a GBA1 protein may be administered to a subject to treat Parkinson's Disease, e.g., PD associated with one or more mutations in a GBA1 gene.

[0749] In some embodiments, the disclosure provides a method for treating Gaucher Disease (GD) (e.g., GD1, GD2, or GD3). In some embodiments, the GD is GD1. In some embodiments, the GD is GD3.

[0750] In some embodiments, the disclosure provides a method of treating Dementia with Lewy Bodies (DLB).

[0751] In some embodiments, administration of the AAV particles comprising viral genomes that encode a GBA1 protein may protect central nervous system pathways from degeneration. The compositions and methods described herein are also useful for treating Gaucher disease (such as Type 1 or Type 3 GD), and Dementia with Lewy Bodies, and other GBA1-related disorders.

[0752] In some embodiments, the delivery of the AAV particles may halt or slow progression of GBA1-related disorders as measured by cholesterol accumulation in CNS cells (as determined, for example, by filipin staining and quantification). In certain embodiments, the delivery of the AAV particles improves symptoms of GBA1-related disorders, including, for example, cognitive, muscular, physical, and sensory symptoms of GBA1-related disorders.

[0753] In some embodiments, the present disclosure encompasses the delivery of pharmaceutical, prophylactic, diagnostic, or imaging compositions in combination with agents that may improve their bioavailability, reduce and/or modify their metabolism, and/or modify their distribution within the body.

[0754] In certain embodiments, the pharmaceutical compositions described herein are used as research tools, particularly in in vitro investigations using human cell lines such as HEK293T and in vivo testing in nonhuman primates which will occur prior to human clinical trials.

### CNS Diseases

[0755] The present disclosure provides a method for treating a disease, disorder and/or condition in a mammalian subject, including a human subject, comprising administering to the subject any of the viral particles e.g., AAV, AAV particle, or AAV viral genome that produces a GBA1 protein described herein or administering to the subject a particle comprising said AAV particle or AAV genome, or administering to the subject any of the described compositions, including pharmaceutical compositions.

[0756] In some embodiments, AAV particles of the present disclosure, through delivery of a functional payload that is a therapeutic product comprising a GBA1 protein or variant thereof that can modulate the level or function of a gene product in the CNS.

[0757] A functional payload may alleviate or reduce symptoms that result from abnormal level and/or function of a gene product (e.g., an absence or defect in a protein) in a subject in need thereof or that otherwise confers a benefit to a CNS disorder in a subject in need thereof.

[0758] As non-limiting examples, companion or combination therapeutic products delivered by AAV particles of the present disclosure may include, but are not limited to, growth and trophic factors, cytokines, hormones, neurotransmitters, enzymes, anti-apoptotic factors, angiogenic factors, a GBA1 protein, and any protein known to be mutated in pathological disorders such as GBA1-related disorders.

[0759] In some embodiments, AAV particles of the present disclosure may be used to treat diseases that are associated with impairments of the growth and development of the CNS, e.g., neurodevelopmental disorders. In some aspects, such neurodevelopmental disorders may be caused by genetic mutations.

[0760] In some embodiments, the neurological disorders may be functional neurological disorders with motor and/or sensory symptoms which have neurological origin in the CNS. As non-limiting examples, functional neurological disorders may be chronic pain, seizures, speech problems, involuntary movements, or sleep disturbances.

[0761] In some embodiments, the neurological or neuromuscular disease, disorder, and/or condition is GBA1-related disorders. In some embodiments, the delivery of the AAV particles may halt or slow the disease progression of GBA1-related disorders by 10%, 20%, 30%, 40%, 50%, 60%, 70%, 80%, 90%, 95%, or more than 95% using a known analysis method and comparator group for GBA1-related disorders. As a non-limiting example, the delivery of the AAV particles may halt or slow progression of GBA1-related disorders as measured by cholesterol accumulation in CNS cells (as determined, for example, by filipin staining and quantification).

[0762] In some embodiments, the delivery of an AAV particle described herein increases the amount of GBA1 protein in a tissue by 1%, 2%, 3%, 4%, 5%, 6%, 7%, 8%, 9%, 10%, 11%, 12%, 13%, 14%, 15%, 16%, 17%, 18%, 19%, 20%, 25%, 30%, 35%, 40%, 45%, 50%, 55%, 60%, 65%, 70%, 75%, 80%, 85%, 90%, 95%, 97%, 99%, or more than 100%. In some embodiments, the delivery of an AAV particle described herein may increase the amount of GBA1 protein in a tissue to be comparable to (e.g., approximately the same as) the amount of GBA1 protein in the corresponding tissue of a healthy subject. In some embodiments, the delivery of an AAV particle described herein may increase the amount of GBA1 protein in a tissue effective to reduce one or more symptoms of a disease associated with decreased GBA1 protein expression or a deficiency in the quantity and/or function of GBA1 protein.

[0763] In some embodiments, the AAV particles and AAV viral genomes described herein, upon administration to subject or introduction to a target cell, increase GBA1 activity about 2-3 fold over baseline GBA1 activity. In the case of subjects or target cells with deficient GBA1 activity, as in the case of subjects having a GBA1-related disorder or cells or tissues harboring at least one mutation in a GBA1 gene, the AAV particles and AAV vector genomes described herein restore GBA1 activity to normal levels, as defined by GBA1 activity levels in subjects, tissues, and cells not afflicted with a GBA1-related disorder or not harboring a GBA1 gene mutation. In some embodiments, the AAV particles and AAV vector genomes described herein effectively reduce α-synuclein levels in subjects having a GBA1-related disorder or cells or tissues harboring at least one mutation in a GBA1 gene. In some embodiments, the AAV particles and AAV viral genomes described herein effectively prevent α-synuclein mediated pathology.

### Therapeutic Applications

[0764] The present disclosure additionally provides methods for treating non-infectious diseases and/or disorders in a mammalian subject, including a human subject, comprising administering to the subject any of the AAV particles or pharmaceutical compositions described herein. In some embodiments, non-infectious diseases and/or disorders treated according to the methods described herein include, but are not limited to, Parkinson's Disease (PD) (e.g., PD associated with one or more mutations in a GBA1 gene), Dementia with Lewy Bodies (DLB), Multiple System Atrophy (MSA), Decreased muscle mass, Spinal muscular atrophy (SMA), Alzheimer's disease (AD), Amyotrophic lateral sclerosis (ALS), Huntington's Disease (HD), Multiple sclerosis (MS), Stroke, Migraine, Pain, Neuropathies, Psychiatric disorders including schizophrenia, bipolar disorder, and autism, Cancer, ocular diseases, systemic diseases of the blood, heart and bone, Immune system and Autoimmune diseases and Inflammatory diseases.

[0765] The present disclosure provides a method for administering to a subject in need thereof, including a human subject, a therapeutically effective amount of the AAV particles of the invention to slow, stop or reverse disease progression. As a non-limiting example, disease progression may be measured by tests or diagnostic tool(s) known to those skilled in the art. As another non-limiting example, disease progression may be measured by change in the pathological features of the brain, CSF, or other tissues or fluids of the subject.

### Gaucher Disease

[0766] Homozygous or compound heterozygous GBA1 mutations lead to Gaucher disease (“GD”). See Sardi, S. Pablo, Jesse M. Cedarbaum, and Patrik Brundin. Movement Disorders 33.5 (2018): 684-696, the contents of which are incorporated by reference in their entirety. Gaucher disease is one of the most prevalent lysosomal storage disorders, with an estimated standardized birth incidence in the general population of between 0.4 to 5.8 individuals per 100,000. Heterozygous GBA1 mutations can lead to PD. Indeed, GBA1 mutations occur in 7-10% of total PD patients, making GBA1 mutations the most important genetic risk factor of PD. PD-GBA1 patients have reduced levels of lysosomal enzyme beta-glucocerebrosidase (GCase), which results in increased accumulations of glycosphingolipid glucosylceramide (GluCer), which in turn is correlated with exacerbated α-Synuclein aggregation and concomitant neurological symptoms. Gaucher disease and PD, as well as other lysosomal storage disorders including Lewy body diseases such as Dementia with Lewy Bodies, and related diseases, in some cases, share common etiology in the GBA1 gene. See Sidransky, E. and Lopez, G. Lancet Neurol. 2012 November; 11 (11): 986-998, the contents of which are incorporated by reference in their entirety.

[0767] Gaucher disease can present as GD1 (Type 1 GD), which is the most common type of Gaucher disease among Ashkenazi Jewish populations. In some embodiments, a Type I GD is a non-neuronopathic GD (e.g., does not affect the CNS, e.g., impacts cells and tissues outside of the CNS, e.g., a peripheral cell or tissue, e.g., a heart tissue, a liver tissue, a spleen tissue, or a combination thereof). The carrier frequency among Ashkenazi Jewish populations is approximately 1 in 12 individuals. GD2 (Type 2 GD) is characterized by acute neuronopathic GD (e.g., affects the CNS, e.g., cells and tissues of the brain, spinal cord, or both), and has an estimated incidence of 1 in 150,000 live births. GD2 (Type 2 GD) is an early onset disease, typically presenting at about 1 year of age. Visceral involvement is extensive and severe, with numerous attributes of CNS disease, including oculomotor dysfunction, and bulbar palsy and generalized weakness, and progressive development delay. GD2 progresses to severe hypertonia, rigidity, opisthotonos, dysphagia, and seizures, typically resulting in death before age 2. GD3 (Type 3 GD) is characterized by sub-acute neuropathic GD and as an estimated incidence of 1 in 200,000 live births. GD3 typically presents with pronounced neurologic signs, including a characteristic mask-like face, strabismus, supranuclear gaze palsy, and poor upward gaze initiation. GD2 and GD3 are each further characterized as associated with progressive encephalopathy, with developmental delay, cognitive impairment, progressive dementia, ataxia, myoclonus, and various gaze palsies. GD1, on the other hand, can have variable etiology, with visceromegaly, marrow and skeletal and pulmonary pathology, bleeding diatheses, and developmental delay. GD is further associated with increased rates of hematologic malignancies.

[0768] Deficiency of Glucocerebrosidase (GCase) is the underlying mechanism of GD. Low GCase activity leads to accumulation of glucocerebroside and other glycolipids within the lysosomes of macrophages. Accumulation can amount to about 20-fold to about 100-fold higher than in control cells or subjects without GCase deficiency. Pathologic lipid accumulation in macrophages accounts for <2% of additional tissue mass observed in the liver and spleen of GD patients. Additional increase in organ weight and volume is attributed to an inflammatory and hyperplastic cellular response.

[0769] Current treatments of GD include administration of recombinant enzymes, imiglucerase, taliglucerase alfa, and velaglucerase alfa. However, these intravenous enzyme therapies do not cross the blood brain barrier (BBB), and are not suitable for treatment of GD with Parkinson's disease or other neuronopathic forms of GD.

### Parkinson's Disease

[0770] Parkinson's Disease (PD) is a progressive disorder of the nervous system affecting especially the substantia nigra of the brain. PD develops as a result of the loss of dopamine producing brain cells. Typical early symptoms of PD include shaking or trembling of a limb, e.g. hands, arms, legs, feet and face. Additional characteristic symptoms are stiffness of the limbs and torso, slow movement or an inability to move, impaired balance and coordination, cognitional changes, and psychiatric conditions e.g. depression and visual hallucinations. PD has both familial and idiopathic forms and it is suggestion to be involved with genetic and environmental causes. PD affects more than 4 million people worldwide. In the US, approximately 60,000 cases are identified annually. Generally PD begins at the age of 50 or older. An early-onset form of the condition begins at age younger than 50, and juvenile-onset PD begins before age of 20.

[0771] Death of dopamine producing brain cells related to PD has been associated with aggregation, deposition and dysfunction of alpha-synuclein protein (see, e.g. Marques and Outeiro, 2012, Cell Death Dis. 3: e350, Jenner, 1989,J Neurol Neurosurg Psychiatry. Special Supplement, 22-28, and references therein). Studies have suggested that alpha-synuclein has a role in presynaptic signaling, membrane trafficking and regulation of dopamine release and transport. Alpha-synuclein aggregates, e.g. in forms of oligomers, have been suggested to be species responsible for neuronal dysfunction and death. Mutations of the alpha-synuclein gene (SNCA) have been identified in the familial forms of PD, but also environmental factors, e.g. neurotoxin affect alpha-synuclein aggregation. Other suggested causes of brain cell death in PD are dysfunction of proteasomal and lysosomal systems, reduced mitochondrial activity.

[0772] PD is related to other diseases related to alpha-synuclein aggregation, referred to as “synucleinopathies.” Such diseases include, but are not limited to, Parkinson's Disease Dementia (PDD), multiple system atrophy (MSA), dementia with Lewy bodies, juvenile-onset generalized neuroaxonal dystrophy (Hallervorden-Spatz disease), pure autonomic failure (PAF), neurodegeneration with brain iron accumulation type-1 (NBIA-1) and combined Alzheimer's and Parkinson's disease.

[0773] As of today, no cure or preventative therapy for PD has been identified. A variety of drug therapies available provide relief to the symptoms. Non-limiting examples of symptomatic medical treatments include carbidopa and levodopa combination reducing stiffness and slow movement, and anticholinergics to reduce trembling and stiffness. Other optional therapies include e.g. deep brain stimulation and surgery. There remains a need for therapy affecting the underlying pathophysiology. For example, antibodies targeting alpha-synuclein protein, or other proteins relevant for brain cell death in PD, may be used to prevent and/or treat PD.

[0774] In some embodiment, methods of the present invention may be used to treat subjects suffering from PD (e.g., PD associated with one or more mutations in a GBA1 gene) and other synucleinopathies. In some cases, methods of the present invention may be used to treat subjects suspected of developing PD (e.g., a PD associated with one or more mutations in a GBA1 gene) and other synucleinopathies.

[0775] AAV Particles and methods of using the AAV particles described herein may be used to prevent, manage and/or treat PD, e.g., a PD associated with one or more mutations in a GBA1 gene.

[0776] Approximately 5% of PD patients carry one or more GBA1 mutations: 10% of patients with type 1 GD develop PD before the age of 80 years, compared to about 3-4% in the normal population. Additionally, heterozygous or homozygous GBA1 mutation(s) have been shown to increase the risk of PD 20-30 fold.

Dementia with Lewy Bodies

[0777] Dementia with Lewy Bodies (DLB), also known as diffuse Lewy body disease, is a form of progressive dementia, characterized by cognitive decline, fluctuating alertness and attention, visual hallucinations and parkinsonian motor symptoms. DLB may be inherited by an autosomal dominant pattern. DLB affects more than 1 million individuals in the US. The condition typically shows symptoms at the age of 50 or older.

[0778] DLB is caused by the abnormal build-up of Lewy bodies, aggregates of the alpha-synuclein protein, in the cytoplasm of neurons in the brain areas controlling memory and motor control. The pathophysiology of these aggregates is very similar to aggregates observed in Parkinson's disease and DLB also has similarities to Alzheimer's disease. Inherited DLB has been associated with gene mutation(s) in GBAs.

[0779] As of today, there is no cure or prevention therapy for DLB. A variety of drug therapies available are aimed at managing the cognitive, psychiatric and motor control symptoms of the condition. Non-limiting examples of symptomatic medical treatments include e.g. acetylcholinesterase inhibitors to reduce cognitive symptoms, and levodopa to reduce stiffness and loss of movement. There remains a need for therapy affecting the underlying pathophysiology.

[0780] In some embodiments, methods of the present disclosure may be used to treat subjects suffering from DLB (e.g., a DLB associated with one or more mutations in a GBA1 gene). In some cases, the methods may be used to treat subjects suspected of developing DLB (e.g., a DLB associated with one or more mutations in a GBA1 gene).

[0781] AAV Particles and methods of using the AAV particles described in the present invention may be used to prevent, manage and/or treat DLB (e.g., a DLB associated with one or more mutations in a GBA1 gene).

### VI. Dosing and Administration

### Administration

[0782] In some aspects, the present disclosure provides administration and/or delivery methods for vectors and viral particles, e.g., AAV particles, encoding GCase protein or a variant thereof, for the prevention, treatment, or amelioration of diseases or disorders of the CNS. For example, administration of the AAV particles prevents, treats, or ameliorates GBA1-related disorders. Thus, robust widespread GCase protein distribution throughout the CNS and periphery is desired for maximal efficacy. Particular target tissues for administration or delivery include CNS tissues, brain tissue, and, more specifically, caudate-putamen, thalamus, superior colliculus, cortex, and corpus collosum. Particular embodiments provide administration and/or delivery of the AAV particles and AAV vector genomes described herein to caudate-putamen and/or substantia nigra. Other particular embodiments provide administration and/or delivery of the AAV particles and AAV vector genomes described herein to thalamus.

[0783] The AAV particles of the present disclosure may be administered by any route which results in a therapeutically effective outcome. These include, but are not limited to, enteral (into the intestine), gastroenteral, epidural (into the dura matter), oral (by way of the mouth), transdermal, peridural, intracerebral (into the cerebrum), intracerebroventricular (into the cerebral ventricles), intracranial (into the skull), picutaneous (application onto the skin), intradermal, (into the skin itself), subcutaneous (under the skin), nasal administration (through the nose), intravenous (into a vein), intravenous bolus, intravenous drip, intraarterial (into an artery), intramuscular (into a muscle), intracardiac (into the heart), intraosseous infusion (into the bone marrow), intraparenchymal (into the substance of), intrathecal (into the spinal canal), intraperitoneal, (infusion or injection into the peritoneum), intravesicular infusion, intravitreal, (through the eye), intracavernous injection (into a pathologic cavity) intracavitary (into the base of the penis), intravaginal administration, intrauterine, extra-amniotic administration, transdermal (diffusion through the intact skin for systemic distribution), transmucosal (diffusion through a mucous membrane), transvaginal, insufflation (snorting), sublingual, sublabial, enema, eye drops (onto the conjunctiva), in ear drops, auricular (in or by way of the ear), buccal (directed toward the cheek), conjunctival, cutaneous, dental (to a tooth or teeth), electro-osmosis, endocervical, endosinusial, endotracheal, extracorporeal, hemodialysis, infiltration, interstitial, intra-abdominal, intra-amniotic, intra-articular, intrabiliary, intrabronchial, intrabursal, intracartilaginous (within a cartilage), intracaudal (within the cauda equine), intracisternal (within the cisterna magna cerebellomedularis), intracorneal (within the cornea), dental intracoronal, intracoronary (within the coronary arteries), intracorporus cavernosum (within the dilatable spaces of the corporus cavernosa of the penis), intradiscal (within a disc), intraductal (within a duct of a gland), intraduodenal (within the duodenum), intradural (within or beneath the dura), intraepidermal (to the epidermis), intraesophageal (to the esophagus), intragastric (within the stomach), intragingival (within the gingivae), intraileal (within the distal portion of the small intestine), intralesional (within or introduced directly to a localized lesion), intraluminal (within a lumen of a tube), intralymphatic (within the lymph), intramedullary (within the marrow cavity of a bone), intrameningeal (within the meninges), intraocular (within the eye), intraovarian (within the ovary), intrapericardial (within the pericardium), intrapleural (within the pleura), intraprostatic (within the prostate gland), intrapulmonary (within the lungs or its bronchi), intrasinal (within the nasal or periorbital sinuses), intraspinal (within the vertebral column), intrasynovial (within the synovial cavity of a joint), intratendinous (within a tendon), intratesticular (within the testicle), intrathecal (within the cerebrospinal fluid at any level of the cerebrospinal axis), intrathoracic (within the thorax), intratubular (within the tubules of an organ), intratumor (within a tumor), intratympanic (within the aurus media), intravascular (within a vessel or vessels), intraventricular (within a ventricle), iontophoresis (by means of electric current where ions of soluble salts migrate into the tissues of the body), irrigation (to bathe or flush open wounds or body cavities), laryngeal (directly upon the larynx), nasogastric (through the nose and into the stomach), occlusive dressing technique (topical route administration which is then covered by a dressing which occludes the area), ophthalmic (to the external eye), oropharyngeal (directly to the mouth and pharynx), parenteral, percutaneous, periarticular, peridural, perineural, periodontal, rectal, respiratory (within the respiratory tract by inhaling orally or nasally for local or systemic effect), retrobulbar (behind the pons or behind the eyeball), soft tissue, subarachnoid, subconjunctival, submucosal, subpial, topical, transplacental (through or across the placenta), transtracheal (through the wall of the trachea), transtympanic (across or through the tympanic cavity), ureteral (to the ureter), urethral (to the urethra), vaginal, caudal block, diagnostic, nerve block, biliary perfusion, cardiac perfusion, photopheresis or spinal.

[0784] In some embodiments, the AAV particles of the present disclosure are administered intravenously.

[0785] In some embodiments, AAV particles of the present disclosure are administered so as to be delivered to a target cell or tissue. Delivery to a target cell results in GCase protein expression. A target cell may be any cell in which it is considered desirable to increase GCase protein expression levels. A target cell may be a CNS cell. Non-limiting examples of such cells and/or tissues include, dorsal root ganglia and dorsal columns, proprioceptive sensory neurons, Clark's column, gracile and cuneate nuclei, cerebellar dentate nucleus, corticospinal tracts and the cells comprising the same, Betz cells, and cells of the heart.

[0786] In some embodiments, compositions may be administered in a way that allows them to cross the blood-brain barrier, vascular barrier, or other epithelial barrier.

[0787] In some embodiments, delivery of GCase protein by adeno-associated virus (AAV) particles to cells of the central nervous system (e.g., parenchyma) comprises infusion into cerebrospinal fluid (CSF). CSF is produced by specialized ependymal cells that comprise the choroid plexus located in the ventricles of the brain. CSF produced within the brain then circulates and surrounds the central nervous system including the brain and spinal cord. CSF continually circulates around the central nervous system, including the ventricles of the brain and subarachnoid space that surrounds both the brain and spinal cord, while maintaining a homeostatic balance of production and reabsorption into the vascular system. The entire volume of CSF is replaced approximately four to six times per day or approximately once every four hours, though values for individuals may vary.

[0788] In some embodiments, the AAV particles may be delivered by systemic delivery. In some embodiments, the systemic delivery may be by intravascular administration. In some embodiments, the systemic delivery may be by intravenous (IV) administration.

[0789] In some embodiments, the AAV particles may be delivered by intravenous delivery.

[0790] In some embodiments, the AAV particle is administered to the subject via focused ultrasound (FUS), e.g., coupled with the intravenous administration of microbubbles (FUS-MB), or MRI-guided FUS coupled with intravenous administration, e.g., as described in Terstappen et al. (Nat Rev Drug Discovery, https://doi.org/10.1038/s41573-021-00139-y (2021)), Burgess et al. (Expert Rev Neurother. 15 (5): 477-491 (2015)), and/or Hsu et al. (PLOS One 8 (2): 1-8), the contents of which are incorporated herein by reference in its entirety.

[0791] In some embodiments, the AAV particles may be delivered by injection into the CSF pathway. Non-limiting examples of delivery to the CSF pathway include intrathecal and intracerebroventricular administration.

[0792] In some embodiments, the AAV particles may be delivered by thalamic delivery.

[0793] In some embodiments, the AAV particles may be delivered by intracerebral delivery.

[0794] In some embodiments, the AAV particles may be delivered by intracardiac delivery.

[0795] In some embodiments, the AAV particles may be delivered by intracranial delivery.

[0796] In some embodiments, the AAV particles may be delivered by intra cisterna magna (ICM) delivery.

[0797] In some embodiments, the AAV particles may be delivered by direct (intraparenchymal) injection into an organ (e.g., CNS (brain or spinal cord)). In some embodiments, the intraparenchymal delivery may be to any region of the brain or CNS.

[0798] In some embodiments, the AAV particles may be delivered by intrastriatal injection.

[0799] In some embodiments, the AAV particles may be delivered into the putamen.

[0800] In some embodiments, the AAV particles may be delivered into the spinal cord.

[0801] In some embodiments, the AAV particles of the present disclosure may be administered to the ventricles of the brain.

[0802] In some embodiments, the AAV particles of the present disclosure may be administered to the ventricles of the brain by intracerebroventricular delivery.

[0803] In some embodiments, the AAV particles of the present disclosure may be administered by intramuscular delivery.

[0804] In some embodiments, the AAV particles of the present disclosure are administered by more than one route described above. As a non-limiting example, the AAV particles may be administered by intravenous delivery and thalamic delivery.

[0805] In some embodiments, the AAV particles of the present disclosure are administered by more than one route described above. As a non-limiting example, the AAV particles may be administered by intravenous delivery and intracerebral delivery.

[0806] In some embodiments, the AAV particles of the present disclosure are administered by more than one route described above. As a non-limiting example, the AAV particles may be administered by intravenous delivery and intracranial delivery.

[0807] In some embodiments, the AAV particles of the present disclosure are administered by more than one route described above. In some embodiments, the AAV particles of the present disclosure may be delivered by intrathecal and intracerebroventricular administration.

[0808] In some embodiments, the AAV particles may be delivered to a subject to improve and/or correct mitochondrial dysfunction.

[0809] In some embodiments, the AAV particles may be delivered to a subject to preserve neurons. The neurons may be primary and/or secondary sensory neurons. In some embodiments, AAV particles are delivered to dorsal root ganglia and/or neurons thereof.

[0810] In some embodiments, administration of the AAV particles may preserve and/or correct function in the sensory pathways.

[0811] In some embodiments, the AAV particles may be delivered via intravenous (IV), intracerebroventricular (ICV), intraparenchymal, and/or intrathecal (IT) infusion and the therapeutic agent may also be delivered to a subject via intramuscular (IM) limb infusion in order to deliver the therapeutic agent to the skeletal muscle. Delivery of AAVs by intravascular limb infusion is described by Gruntman and Flotte, Human Gene Therapy Clinical Development, 2015, 26 (3), 159-164, the contents of which are herein incorporated by reference in their entirety.

[0812] In some embodiments, delivery of viral vector pharmaceutical compositions in accordance with the present disclosure to cells of the central nervous system (e.g., parenchyma) comprises a rate of delivery defined by VG/hour=mL/hour*VG/mL, wherein VG is viral genomes, VG/mL is composition concentration, and mL/hour is rate of infusion.

[0813] In some embodiments, delivery of AAV particle pharmaceutical compositions in accordance with the present disclosure to cells of the central nervous system (e.g., parenchyma) comprises infusion of up to 1 mL. In some embodiments, delivery of viral vector pharmaceutical compositions in accordance with the present disclosure to cells of the central nervous system (e.g., parenchyma) may comprise infusion of 0.0001, 0.0002, 0.001, 0.002, 0.003, 0.004, 0.005, 0.008, 0.010, 0.015, 0.020, 0.025, 0.030, 0.040, 0.050, 0.060, 0.070, 0.080, 0.090, 0.1, 0.2, 0.3, 0.4, 0.5, 0.6, 0.7, 0.8, or 0.9 mL.

[0814] In some embodiments, delivery of AAV particle pharmaceutical compositions in accordance with the present disclosure to cells of the central nervous system (e.g., parenchyma) comprises infusion of between about 1 mL to about 120 mL. In some embodiments, delivery of viral vector pharmaceutical compositions in accordance with the present disclosure to cells of the central nervous system (e.g., parenchyma) may comprise an infusion of 0.1, 1, 1.1, 1.2, 1.3, 1.4, 1.5, 1.6, 1.7, 1.8, 1.9, 2, 3, 4, 5, 6, 7, 8, 9, 10, 11, 12, 13, 14, 15, 16, 17, 18, 19, 20, 21, 22, 23, 24, 25, 26, 27, 28, 29, 30, 31, 32, 33, 34, 35, 36, 37, 38, 39, 40, 41, 42, 43, 44, 45, 46, 47, 48, 49, 50, 51, 52, 53, 54, 55, 56, 57, 58, 59, 60, 61, 62, 63, 64, 65, 66, 67, 68, 69, 70, 71, 72, 73, 74, 75, 76, 77, 78, 79, 80, 81, 82, 83, 84, 85, 86, 87, 88, 89, 90, 91, 92, 93, 94, 95, 96, 97, 98, 99, 100, 101, 102, 103, 104, 105, 106, 107, 108, 109, 110, 111, 112, 113, 114, 115, 116, 117, 118, 119, or 120 mL. In some embodiments delivery of AAV particles to cells of the central nervous system (e.g., parenchyma) comprises infusion of at least 3 mL. In some embodiments, delivery of AAV particles to cells of the central nervous system (e.g., parenchyma) consists of infusion of 3 mL. In some embodiments, delivery of AAV particles to cells of the central nervous system (e.g., parenchyma) comprises infusion of at least 10 mL. In some embodiments, delivery of AAV particles to cells of the central nervous system (e.g., parenchyma) consists of infusion of 10 mL.

[0815] In some embodiments, the volume of the AAV particle pharmaceutical composition delivered to the cells of the central nervous system (e.g., parenchyma) of a subject is 2 μl, 20 μl, 50 μl, 80 μl, 100 μl, 200 μl, 300 μl, 400 μl, 500 μl, 600 μl, 700 μl, 800 μl, 900 μl, 1000 μl, 1100 μl, 1200 μl, 1300 μl, 1400 μl, 1500 μl, 1600 μl, 1700 μl, 1800 μl, 1900 μl, 2000 μl, or more than 2000 μl.

[0816] In some embodiments, the volume of the AAV particle pharmaceutical composition delivered to a region in both hemispheres of a subject brain is 2 μl, 20 μl, 50 μl, 80 μl, 100 μl, 200 μl, 300 μl, 400 μl, 500 μl, 600 μl, 700 μl, 800 μl, 900 μl, 1000 μl, 1100 μl, 1200 μl, 1300 μl, 1400 μl, 1500 μl, 1600 μl, 1700 μl, 1800 μl, 1900 μl, 2000 μl, or more than 2000 μl. In some embodiments, the volume delivered to a region in both hemispheres is 200 μl. As another non-limiting example, the volume delivered to a region in both hemispheres is 900 μl. As yet another non-limiting example, the volume delivered to a region in both hemispheres is 1800 μl.

[0817] In certain embodiments, AAV particle or viral vector pharmaceutical compositions in accordance with the present disclosure may be administered at about 10 to about 600 μl/site, about 50 to about 500 μl/site, about 100 to about 400 μl/site, about 120 to about 300 μl/site, about 140 to about 200 μl/site, or about 160 μl/site.

[0818] In some embodiments, the total volume delivered to a subject may be split between one or more administration sites e.g., 1, 2, 3, 4, 5, or more than 5 sites. In some embodiments, the total volume is split between administration to the left and right hemisphere.

### Delivery of AAV Particles

[0819] In some embodiments, the AAV particles or pharmaceutical compositions of the present disclosure may be administered or delivered using the methods for treatment of disease described in U.S. Pat. No. 8,999,948, or International Publication No. WO2014178863, the contents of which are herein incorporated by reference in their entirety.

[0820] In some embodiments, the AAV particles or pharmaceutical compositions of the present disclosure may be administered or delivered using the methods for delivering gene therapy in Alzheimer's Disease or other neurodegenerative conditions as described in U.S. application No. 20150126590, the contents of which are herein incorporated by reference in their entirety.

[0821] In some embodiments, the AAV particles or pharmaceutical compositions of the present disclosure may be administered or delivered using the methods for delivery of a CNS gene therapy as described in U.S. Pat. Nos. 6,436,708, and 8,946,152, and International Publication No. WO2015168666, the contents of which are herein incorporated by reference in their entirety.

[0822] In some embodiments, the AAV particles of the present disclosure may be administered or delivered using the methods for the delivery of AAV virions described in European Patent Application No. EP1857552, the contents of which are herein incorporated by reference in their entirety.

[0823] In some embodiments, the AAV particle or pharmaceutical compositions of the present disclosure may be administered or delivered using the methods for delivering proteins using AAV vectors described in European Patent Application No. EP2678433, the contents of which are herein incorporated by reference in their entirety.

[0824] In some embodiments, the viral vector encoding GCase protein may be administered or delivered using the methods for delivering DNA molecules using AAV vectors described in U.S. Pat. No. 5,858,351, the contents of which are herein incorporated by reference in their entirety.

[0825] In some embodiments, the AAV particle or pharmaceutical compositions of the present disclosure may be administered or delivered using the methods for delivering DNA to the bloodstream described in U.S. Pat. No. 6,211,163, the contents of which are herein incorporated by reference in their entirety.

[0826] In some embodiments, the viral vector encoding GCase protein may be administered or delivered using the methods for delivering AAV virions described in U.S. Pat. No. 6,325,998, the contents of which are herein incorporated by reference in their entirety.

[0827] In some embodiments, the viral vector encoding GCase protein may be administered or delivered using the methods for delivering DNA to muscle cells described in U.S. Pat. No. 6,335,011, the contents of which are herein incorporated by reference in their entirety.

[0828] In some embodiments, the viral vector encoding GCase protein may be administered or delivered using the methods for delivering DNA to muscle cells and tissues described in U.S. Pat. No. 6,610,290, the contents of which are herein incorporated by reference in their entirety.

[0829] In some embodiments, the viral vector encoding GCase protein may be administered or delivered using the methods for delivering DNA to muscle cells described in U.S. Pat. No. 7,704,492, the contents of which are herein incorporated by reference in their entirety.

[0830] In some embodiments, the viral vector encoding GCase protein may be administered or delivered using the methods for delivering a payload to skeletal muscles described in U.S. Pat. No. 7,112,321, the contents of which are herein incorporated by reference in their entirety.

[0831] In some embodiments, the AAV particle or pharmaceutical compositions of the present disclosure may be administered or delivered using the methods for delivering a payload to the central nervous system described in U.S. Pat. No. 7,588,757, the contents of which are herein incorporated by reference in their entirety.

[0832] In some embodiments, the AAV particle or pharmaceutical compositions of the present disclosure may be administered or delivered using the methods for delivering a payload described in U.S. Pat. No. 8,283,151, the contents of which are herein incorporated by reference in their entirety.

[0833] In some embodiments, the AAV particle or pharmaceutical compositions of the present disclosure may be administered or delivered using the methods for delivering a payload for the treatment of Alzheimer disease described in U.S. Pat. No. 8,318,687, the contents of which are herein incorporated by reference in their entirety.

[0834] In some embodiments, the AAV particle or pharmaceutical compositions of the present disclosure may be administered or delivered using the methods for delivering a payload described in International Patent Publication No. WO2012144446, the contents of which are herein incorporated by reference in their entirety.

[0835] In some embodiments, the AAV particle or pharmaceutical compositions of the present disclosure may be administered or delivered using the methods for delivering a payload using a glutamic acid decarboxylase (GAD) delivery vector described in International Patent Publication No. WO2001089583, the contents of which are herein incorporated by reference in their entirety.

[0836] In some embodiments, the AAV particle or pharmaceutical compositions of the present disclosure may be administered or delivered using the methods for delivering a payload to neural cells described in International Patent Publication No. WO2012057363, the contents of which are herein incorporated by reference in their entirety.

[0837] In some embodiments, the AAV particle or pharmaceutical compositions of the present disclosure may be administered or delivered using the methods for delivering a payload described in International Patent Publication No. WO2001096587, the contents of which are herein incorporated by reference in their entirety.

[0838] In some embodiments, the AAV particle or pharmaceutical compositions of the present disclosure may be administered or delivered using the methods for delivering a payload to muscle tissue described in International Patent Publication No. WO2002014487, the contents of which are herein incorporated by reference in their entirety.

[0839] In some embodiments, a catheter may be used to administer the AAV particles. In certain embodiments, the catheter or cannula may be located at more than one site in the spine for multi-site delivery. The viral particles encoding may be delivered in a continuous and/or bolus infusion. Each site of delivery may be a different dosing regimen or the same dosing regimen may be used for each site of delivery. In some embodiments, the sites of delivery may be in the cervical and the lumbar region. In some embodiments, the sites of delivery may be in the cervical region. In some embodiments, the sites of delivery may be in the lumbar region.

[0840] In some embodiments, a subject may be analyzed for spinal anatomy and pathology prior to delivery of the AAV particles described herein. As a non-limiting example, a subject with scoliosis may have a different dosing regimen and/or catheter location compared to a subject without scoliosis.

[0841] In some embodiments, the delivery method and duration is chosen to provide broad transduction in the spinal cord. In some embodiments, intrathecal delivery is used to provide broad transduction along the rostral-caudal length of the spinal cord. In some embodiments, multi-site infusions provide a more uniform transduction along the rostral-caudal length of the spinal cord.

### Delivery to Cells

[0842] In some aspects, the present disclosure provides a method of delivering to a cell or tissue any of the above-described AAV particles, comprising contacting the cell or tissue with said AAV particle or contacting the cell or tissue with a formulation comprising said AAV particle, or contacting the cell or tissue with any of the described compositions, including pharmaceutical compositions. The method of delivering the AAV particle to a cell or tissue can be accomplished in vitro, ex vivo, or in vivo.

### Delivery to Subjects

[0843] In some aspects, the present disclosure additionally provides a method of delivering to a subject, including a mammalian subject, any of the above-described AAV particles comprising administering to the subject said AAV particle, or administering to the subject a formulation comprising said AAV particle, or administering to the subject any of the described compositions, including pharmaceutical compositions.

[0844] In some embodiments, the AAV particles may be delivered to bypass anatomical blockages such as, but not limited to the blood brain barrier.

[0845] In some embodiments, the AAV particles may be formulated and delivered to a subject by a route which increases the speed of drug effect as compared to oral delivery.

[0846] In some embodiments, the AAV particles may be delivered by a method to provide uniform transduction of the spinal cord and dorsal root ganglion (DRG). In some embodiments, the AAV particles may be delivered using intrathecal infusion.

[0847] In some embodiments, a subject may be administered the AAV particles described herein using a bolus infusion. As used herein, a “bolus infusion” means a single and rapid infusion of a substance or composition.

[0848] In some embodiments, the AAV particles encoding GCase protein may be delivered in a continuous and/or bolus infusion. Each site of delivery may be a different dosing regimen or the same dosing regimen may be used for each site of delivery. As a non-limiting example, the sites of delivery may be in the cervical and the lumbar region. As another non-limiting example, the sites of delivery may be in the cervical region. As another non-limiting example, the sites of delivery may be in the lumbar region.

[0849] In some embodiments, the AAV particles may be delivered to a subject via a single route administration.

[0850] In some embodiments, the AAV particles may be delivered to a subject via a multi-site route of administration. For example, a subject may be administered the AAV particles at 2, 3, 4, 5, or more than 5 sites.

[0851] In some embodiments, a subject may be administered the AAV particles described herein using sustained delivery over a period of minutes, hours or days. The infusion rate may be changed depending on the subject, distribution, formulation or another delivery parameter known to those in the art.

[0852] In some embodiments, if continuous delivery (continuous infusion) of the AAV particles is used, the continuous infusion may be for 1 hour, 2, hours, 3 hours, 4 hours, 5 hours, 6 hours, 7 hours, 8 hours, 9 hours, 10 hours, 11 hours, 12 hours, 13 hours, 14 hours, 15 hours, 16 hours, 17 hours, 18 hours, 19 hours, 20 hours, 21 hours, 22 hours, 23 hours, 24 hours, or more than 24 hours.

[0853] In some embodiments, the intracranial pressure may be evaluated prior to administration. The route, volume, AAV particle concentration, infusion duration and/or vector titer may be optimized based on the intracranial pressure of a subject.

[0854] In some embodiments, the AAV particles may be delivered by systemic delivery. In some embodiments, the systemic delivery may be by intravascular administration.

[0855] In some embodiments, the AAV particles may be delivered by injection into the CSF pathway. Non-limiting examples of delivery to the CSF pathway include intrathecal and intracerebroventricular administration.

[0856] In some embodiments, the AAV particles may be delivered by direct (intraparenchymal) injection into the substance of an organ, e.g., one or more regions of the brain.

[0857] In some embodiments, the AAV particles may be delivered by subpial injection into the spinal cord. For example, subjects may be placed into a spinal immobilization apparatus. A dorsal laminectomy may be performed to expose the spinal cord. Guiding tubes and XYZ manipulators may be used to assist catheter placement. Subpial catheters may be placed into the subpial space by advancing the catheter from the guiding tube and AAV particles may be injected through the catheter (Miyanohara et al., Mol Ther Methods Clin Dev. 2016; 3:16046). In some cases, the AAV particles may be injected into the cervical subpial space. In some cases, the AAV particles may be injected into the thoracic subpial space.

[0858] In some embodiments, the AAV particles may be delivered by direct injection to the CNS of a subject. In some embodiments, direct injection is intracerebral injection, intraparenchymal injection, intrathecal injection, intra-cisterna magna injection, or any combination thereof. In some embodiments, direct injection to the CNS of a subject comprises convection enhanced delivery (CED). In some embodiments, administration comprises peripheral injection. In some embodiments, peripheral injection is intravenous injection.

[0859] In some embodiments, the AAV particles may be delivered to a subject in order to increase the GCase protein levels in the caudate-putamen, thalamus, superior colliculus, cortex, and/or corpus callosum as compared to endogenous levels. The increase may be 0.1× to 5×, 0.5× to 5×, 1× to 5×, 2× to 5×, 3× to 5×, 4× to 5×, 0.1× to 4×, 0.5× to 4×, 1× to 4×, 2× to 4×, 3× to 4×, 0.1× to 3×, 0.5× to 3×, 1× to 3×, 2× to 3×, 0.1× to 2×, 0.5× to 2×, 0.1× to 1×, 0.5× to 1×, 0.1× to 0.5×, 1× to 2×, 0.1×, 0.2×, 0.3×, 0.4×, 0.5×, 0.6×, 0.7×, 0.8×, 0.9×, 1.0×, 1.1×, 1.2×, 1.3×, 1.4×, 1.5×, 1.6×, 1.7×, 1.8×, 1.9×, 2.0×, 2.1×, 2.2×, 2.3×, 2.4×, 2.5×, 2.6×, 2.7×, 2.8×, 2.9×, 3.0×, 3.1×, 3.2×, 3.3×, 3.4×, 3.5×, 3.6×, 3.7×, 3.8×, 3.9×, 4.0×, 4.1×, 4.2×, 4.3×, 4.4×, 4.5×, 4.6×, 4.7×, 4.8×, 4.9× or more than 5× as compared to endogenous levels.

[0860] In some embodiments, the AAV particles may be delivered to a subject in order to increase the GCase protein levels in the caudate, putamen, thalamus, superior colliculus, cortex, and/or corpus callosum by transducing cells in these CNS regions. Transduction may also be referred to as the amount of cells that are positive for GCase protein. The transduction may be greater than or equal to 1%, 5%, 10%, 15%, 20%, 25%, 30%, 35%, 40%, 45%, 50%, 55%, 60%, 65%, 70%, 75%, 80%, 85%, 90%, 95%, or 99% of cells in these CNS regions.

[0861] In some embodiments, delivery of AAV particles comprising a viral genome encoding GCase protein described herein to neurons in the caudate-putamen, thalamus, superior colliculus, cortex, and/or corpus callosum will lead to an increased expression of GCase protein. The increased expression may lead to improved survival and function of various cell types in these CNS regions and subsequent improvement of GBA1-related disorder symptoms.

[0862] In particular embodiments, the AAV particles may be delivered to a subject in order to establish widespread distribution of the GCase throughout the nervous system by administering the AAV particles to the thalamus of the subject.

[0863] Specifically, in some embodiments, the increased expression of GCase protein may lead to improved gait, sensory capability, coordination of movement and strength, functional capacity, cognition, and/or quality of life.

### Dosing

[0864] In some aspects, the present disclosure provides methods comprising administering viral vectors and their payloads in accordance with the disclosure to a subject in need thereof. Viral vector pharmaceutical, imaging, diagnostic, or prophylactic compositions thereof, may be administered to a subject using any amount and any route of administration effective for preventing, treating, diagnosing, or imaging a disease, disorder, and/or condition (e.g., a disease, disorder, and/or condition associated with decreased GCase protein expression or a deficiency in the quantity and/or function of GCase protein). In some embodiments, the disease, disorder, and/or condition is GBA1-related disorders. The exact amount required will vary from subject to subject, depending on the species, age, and general condition of the subject, the severity of the disease, the particular composition, its mode of administration, its mode of activity, and the like. Compositions in accordance with the disclosure are typically formulated in unit dosage form for ease of administration and uniformity of dosage. It will be understood, however, that the total daily usage of the compositions of the present disclosure may be decided by the attending physician within the scope of sound medical judgment. The specific therapeutically effective, prophylactically effective, or appropriate imaging dose level for any particular patient will depend upon a variety of factors including the disorder being treated and the severity of the disorder; the activity of the specific compound employed; the specific composition employed; the age, body weight, general health, sex, and diet of the patient; the time of administration, route of administration, and rate of excretion of the specific peptide(s) employed; the duration of the treatment; drugs used in combination or coincidental with the specific compound employed; and like factors well known in the medical arts.

[0865] In certain embodiments, AAV particle pharmaceutical compositions in accordance with the present disclosure may be administered at dosage levels sufficient to deliver GCase protein from about 0.0001 mg/kg to about 100 mg/kg, from about 0.001 mg/kg to about 0.05 mg/kg, from about 0.005 mg/kg to about 0.05 mg/kg, from about 0.001 mg/kg to about 0.005 mg/kg, from about 0.05 mg/kg to about 0.5 mg/kg, from about 0.01 mg/kg to about 50 mg/kg, from about 0.1 mg/kg to about 40 mg/kg, from about 0.5 mg/kg to about 30 mg/kg, from about 0.01 mg/kg to about 10 mg/kg, from about 0.1 mg/kg to about 10 mg/kg, or from about 1 mg/kg to about 25 mg/kg, of subject body weight per day, one or more times a day, to obtain the desired therapeutic, diagnostic, prophylactic, or imaging effect. It will be understood that the above dosing concentrations may be converted to VG or viral genomes per kg or into total viral genomes administered by one of skill in the art.

[0866] In certain embodiments, the desired dosage may be delivered using multiple administrations (e.g., two, three, four, five, six, seven, eight, nine, ten, eleven, twelve, thirteen, fourteen, or more administrations). When multiple administrations are employed, split dosing regimens such as those described herein may be used. As used herein, a “split dose” is the division of single unit dose or total daily dose into two or more doses, e.g., two or more administrations of the single unit dose. As used herein, a “single unit dose” is a dose of any therapeutic composition administered in one dose/at one time/single route/single point of contact, i.e., single administration event. In some embodiments, a single unit dose is provided as a discrete dosage form (e.g., a tablet, capsule, patch, loaded syringe, vial, etc.). As used herein, a “total daily dose” is an amount given or prescribed in 24-hour period. It may be administered as a single unit dose. The viral particles may be formulated in buffer only or in a formulation described herein.

[0867] A pharmaceutical composition described herein can be formulated into a dosage form described herein, such as a topical, intranasal, pulmonary, intratracheal, or injectable (e.g., intravenous, intraocular, intravitreal, intramuscular, intracardiac, intraperitoneal, and/or subcutaneous).

[0868] In some embodiments, delivery of the AAV particles described herein results in minimal serious adverse events (SAEs) as a result of the delivery of the AAV particles.

[0869] In some embodiments, delivery of AAV particle pharmaceutical compositions in accordance with the present disclosure to cells of the central nervous system (e.g., parenchyma) may comprise a total concentration between about 1×10⁶ VG/mL and about 1×10¹⁶ VG/mL. In some embodiments, delivery may comprise a composition concentration of about 1×10⁶, 2×10⁶, 3×10⁶, 4×10⁶, 5×10⁶, 6×10⁶, 7×10⁶, 8×10⁶, 9×10⁶, 1×10⁷, 2×10⁷, 3×10⁷, 4×10⁷, 5×10⁷, 6×10⁷, 7×10⁷, 8×10⁷, 9×10⁷, 1×10⁸, 2×10⁸, 3×10⁸, 4×10⁸, 5×10⁸, 6×10⁸, 7×10⁸, 8×10⁸, 9×10⁸, 1×10⁹, 2×10⁹, 3×10⁹, 4×10⁹, 5×10⁹, 6×10⁹, 7×10⁹, 8×10⁹, 9×10⁹, 1×10¹⁰, 2×10¹⁰, 3×10¹⁰, 4×10¹⁰, 5×10¹⁰, 6×10¹⁰, 7×10¹⁰, 8×10¹⁰, 9×10¹⁰, 1×10¹¹, 1.6×10¹¹, 1.8×10¹¹, 2×10¹¹, 3×10¹¹, 4×10¹¹, 5×10¹¹, 5.5×10¹¹, 6×10¹¹, 7×10¹¹, 8×10¹¹, 9×10¹¹, 0.8×10¹², 0.83×10¹², 1×10¹², 1.1×10¹², 1.2×10¹², 1.3×10¹², 1.4×10¹², 1.5×10¹², 1.6×10¹², 1.7×10¹², 1.8×10¹², 1.9×10¹², 2×10¹², 2.1×10¹², 2.2×10¹², 2.3×10¹², 2.4×10¹², 2.5×10¹², 2.6×10¹², 2.7×10¹², 2.8×10¹², 2.9×10¹², 3×10¹², 3.1×10¹², 3.2×10¹², 3.3×10¹², 3.4×10¹², 3.5×10¹², 3.6×10¹², 3.7×10¹², 3.8×10¹², 3.9×10¹², 4×10¹², 4.1×10¹², 4.2×10¹², 4.3×10¹², 4.4×10¹², 4.5×10¹², 4.6×10¹², 4.7×10¹², 4.8×10¹², 4.9×10¹², 5×10¹², 6×10¹², 7×10¹², 8×10¹², 9×10¹², 1×10¹³, 2×10¹³, 2.3×10¹³, 3×10¹³, 4×10¹³, 5×10¹³, 6×10¹³, 7×10¹³, 8×10¹³, 9×10¹³, 1×10¹⁴, 1.9×10¹⁴, 2×10¹⁴, 3×10¹⁴, 4×10¹⁴, 5×10¹⁴, 6×10¹⁴, 7×10¹⁴, 8×10¹⁴, 9×10¹⁴, 1×10¹⁵, 2×10¹⁵, 3×10¹⁵, 4×10¹⁵, 5×10¹⁵, 6×10¹⁵, 7×10¹⁵, 8×10¹⁵, 9×10¹⁵, or 1×10¹⁶ VG/mL. In some embodiments, the concentration of the viral vector in the composition is 1×10¹³ VG/mL. In some embodiments, the concentration of the viral vector in the composition is 1.1×10¹² VG/mL. In some embodiments, the concentration of the viral vector in the composition is 3.7×10¹² VG/mL. In some embodiments, the concentration of the viral vector in the composition is 8×10¹¹ VG/mL. In some embodiments, the concentration of the viral vector in the composition is 2.6×10¹² VG/mL. In some embodiments, the concentration of the viral vector in the composition is 4.9×10¹² VG/mL. In some embodiments, the concentration of the viral vector in the composition is 0.8×10¹² VG/mL. In some embodiments, the concentration of the viral vector in the composition is 0.83×10¹² VG/mL. In some embodiments, the concentration of the viral vector in the composition is the maximum final dose which can be contained in a vial. In some embodiments, the concentration of the viral vector in the composition is 1.6×10¹¹ VG/mL. In some embodiments, the concentration of the viral vector in the composition is 5×10¹¹ VG/mL. In some embodiments, the concentration of the viral vector in the composition is 2.3×10¹³ VG/mL. In some embodiments, the concentration of the viral vector in the composition is 1.9×10¹⁴ VG/mL.

[0870] In some embodiments, delivery of AAV particle pharmaceutical compositions in accordance with the present disclosure to cells of the central nervous system (e.g., parenchyma) may comprise a total concentration per subject between about 1×10⁶ VG and about 1×10¹⁶ VG. In some embodiments, delivery may comprise a composition concentration of about 1×10⁶, 2×10⁶, 3×10⁶, 4×10⁶, 5×10⁶, 6×10⁶, 7×10⁶, 8×10⁶, 9×10⁶, 1×10⁷, 2×10⁷, 3×10⁷, 4×10⁷, 5×10⁷, 6×10⁷, 7×10⁷, 8×10⁷, 9×10⁷, 1×10⁸, 2×10⁸, 3×10⁸, 4×10⁸, 5×10⁸, 6×10⁸, 7×10⁸, 8×10⁸, 9×10⁸, 1×10⁹, 2×10⁹, 3×10⁹, 4×10⁹, 5×10⁹, 6×10⁹, 7×10⁹, 8×10⁹, 9×10⁹, 1×10¹⁰, 2×10¹⁰, 3×10¹⁰, 4×10¹⁰, 5×10¹⁰, 6×10¹⁰, 7×10¹⁰, 8×10¹⁰, 9×10¹⁰, 1×10¹¹, 1.6×10¹¹, 2×10¹¹, 2.1×10¹¹, 2.2×10¹¹, 2.3×10¹¹, 2.4×10¹¹, 2.5×10¹¹, 2.6×10¹¹, 2.7×10¹¹, 2.8×10¹¹, 2.9×10¹¹, 3×10¹¹, 4×10¹¹, 4.6×10¹¹, 5×10¹¹, 6×10¹¹, 7×10¹¹, 7.1×10¹¹, 7.2×10¹¹, 7.3×10¹¹, 7.4×10¹¹, 7.5×10¹¹, 7.6×10¹¹, 7.7×10¹¹, 7.8×10¹¹, 7.9×10¹¹, 8×10¹¹, 9×10¹¹, 1×10¹², 1.1×10¹², 1.2×10¹², 1.3×10¹², 1.4×10¹², 1.5×10¹², 1.6×10¹², 1.7×10¹², 1.8×10¹², 1.9×10¹², 2×10¹², 2.3×10¹², 3×10¹², 4×10¹², 4.1×10¹², 4.2×10¹², 4.3×10¹², 4.4×10¹², 4.5×10¹², 4.6×10¹², 4.7×10¹², 4.8×10¹², 4.9×10¹², 5×10¹², 6×10¹², 7×10¹², 8×10¹², 8.1×10¹², 8.2×10¹², 8.3×10¹², 8.4×10¹², 8.5×10¹², 8.6×10¹², 8.7×10¹², 8.8×10¹², 8.9×10¹², 9×10¹², 1×10¹³, 2×10¹³, 3×10¹³, 4×10¹³, 5×10¹³, 6×10¹³, 7×10¹³, 8×10¹³, 9×10¹³, 1×10¹⁴, 2×10¹⁴, 3×10¹⁴, 4×10¹⁴, 5×10¹⁴, 6×10¹⁴, 7×10¹⁴, 8×10¹⁴, 9×10¹⁴, 1×10¹⁵, 2×10¹⁵, 3×10¹⁵, 4×10¹⁵, 5×10¹⁵, 6×10¹⁵, 7×10¹⁵, 8×10¹⁵, 9×10¹⁵, or 1×10¹⁶ VG/subject. In some embodiments, the concentration of the viral vector in the composition is 2.3×10¹¹ VG/subject. In some embodiments, the concentration of the viral vector in the composition is 7.2×10¹¹ VG/subject. In some embodiments, the concentration of the viral vector in the composition is 7.5×10¹¹ VG/subject. In some embodiments, the concentration of the viral vector in the composition is 1.4×10¹² VG/subject. In some embodiments, the concentration of the viral vector in the composition is 4.8×10¹² VG/subject. In some embodiments, the concentration of the viral vector in the composition is 8.8×10¹² VG/subject. In some embodiments, the concentration of the viral vector in the composition is 2.3×10¹² VG/subject. In some embodiments, the concentration of the viral vector in the composition is 2×10¹⁰ VG/subject. In some embodiments, the concentration of the viral vector in the composition is 1.6×10¹¹ VG/subject. In some embodiments, the concentration of the viral vector in the composition is 4.6×10¹¹ VG/subject.

[0871] In some embodiments, delivery of AAV particles to cells of the central nervous system (e.g., parenchyma) may comprise a total dose between about 1×10⁶ VG and about 1×10¹⁶ VG. In some embodiments, delivery may comprise a total dose of about 1×10⁶, 2×10⁶, 3×10⁶, 4×10⁶, 5×10⁶, 6×10⁶, 7×10⁶, 8×10⁶, 9×10⁶, 1×10⁷, 2×10⁷, 3×10⁷, 4×10⁷, 5×10⁷, 6×10⁷, 7×10⁷, 8×10⁷, 9×10⁷, 1×10⁸, 2×10⁸, 3×10⁸, 4×10⁸, 5×10⁸, 6×10⁸, 7×10⁸, 8×10⁸, 9×10⁸, 1×10⁹, 2×10⁹, 3×10⁹, 4×10⁹, 5×10⁹, 6×10⁹, 7×10⁹, 8×10⁹, 9×10⁹, 1×10¹⁰, 1.9×10¹⁰, 2×10¹⁰, 3×10¹⁰, 3.73×10¹⁰, 4×10¹⁰, 5×10¹⁰, 6×10¹⁰, 7×10¹⁰, 8×10¹⁰, 9×10¹⁰, 1×10¹¹, 2×10¹¹, 2.5×10¹¹, 3×10¹¹, 4×10¹¹, 5×10¹¹, 6×10¹¹, 7×10¹¹, 8×10¹¹, 9×10¹¹, 1×10¹², 2×10¹², 3×10¹², 4×10¹², 5×10¹², 6×10¹², 7×10¹², 8×10¹², 9×10¹², 1×10¹³, 2×10¹³, 3×10¹³, 4×10¹³, 5×10¹³, 6×10¹³, 7×10¹³, 8×10¹³, 9×10¹³, 1×10¹⁴, 2×10¹⁴, 3×10¹⁴, 4×10¹⁴, 5×10¹⁴, 6×10¹⁴, 7×10¹⁴, 8×10¹⁴, 9×10¹⁴, 1×10¹⁵, 2×10¹⁵, 3×10¹⁵, 4×10¹⁵, 5×10¹⁵, 6×10¹⁵, 7×10¹⁵, 8×10¹⁵, 9×10¹⁵, or 1×10¹⁶ VG. In some embodiments, the total dose is 1×10¹³ VG. In some embodiments, the total dose is 3×10¹³ VG. In some embodiments, the total dose is 3.73×10¹⁰ VG. In some embodiments, the total dose is 1.9×10¹⁰ VG. In some embodiments, the total dose is 2.5×10¹¹ VG. In some embodiments, the total dose is 5×10¹¹ VG. In some embodiments, the total dose is 1×10¹² VG.

[0872] In some embodiments, the total dose is 5×10¹² VG.

### Combinations

[0873] The AAV particles may be used in combination with one or more other therapeutic, prophylactic, diagnostic, or imaging agents. The phrase “in combination with,” is not intended to require that the agents must be administered at the same time and/or formulated for delivery together, although these methods of delivery are within the scope of the present disclosure. Compositions can be administered concurrently with, prior to, or subsequent to, one or more other desired therapeutics or medical procedures. In general, each agent will be administered at a dose and/or on a time schedule determined for that agent. In some embodiments, the present disclosure encompasses the delivery of pharmaceutical, prophylactic, diagnostic, or imaging compositions in combination with agents that may improve their bioavailability, reduce and/or modify their metabolism, and/or modify their distribution within the body.

[0874] The therapeutic agents may be approved by the US Food and Drug Administration or may be in clinical trial or at the preclinical research stage. The therapeutic agents may utilize any therapeutic modality known in the art, with non-limiting examples including gene silencing or interference (i.e., miRNA, siRNA, RNAi, shRNA), gene editing (i.e., TALEN, CRISPR/Cas9 systems, zinc finger nucleases), and gene, protein or enzyme replacement.

### Measurement of Expression

[0875] Expression of GCase protein from viral genomes may be determined using various methods known in the art such as, but not limited to immunochemistry (e.g., IHC), enzyme-linked immunosorbent assay (ELISA), affinity ELISA, ELISPOT, flow cytometry, immunocytology, surface plasmon resonance analysis, kinetic exclusion assay, liquid chromatography-mass spectrometry (LCMS), high-performance liquid chromatography (HPLC), BCA assay, immunoelectrophoresis, Western blot, SDS-PAGE, protein immunoprecipitation, PCR, and/or in situ hybridization (ISH). In some embodiments, transgenes encoding GCase protein delivered in different AAV capsids may have different expression levels in different CNS tissues.

[0876] In certain embodiments, the GCase protein is detectable by Western blot.

[0877] Alternatively methods of detecting GBA1 expression are known, including, for example, use of the methods and compounds as described in Int'l Pub. No. WO2019136484, incorporated herein by reference in its entirety.

### VII. Kits and Devices

### Kits

[0878] In some aspects, the present disclosure provides a variety of kits for conveniently and/or effectively carrying out methods of the present disclosure. Typically, kits will comprise sufficient amounts and/or numbers of components to allow a user to perform multiple treatments of a subject(s) and/or to perform multiple experiments.

[0879] Any of the vectors, constructs, or GCase proteins of the present disclosure may be comprised in a kit. In some embodiments, kits may further include reagents and/or instructions for creating and/or synthesizing compounds and/or compositions of the present disclosure. In some embodiments, kits may also include one or more buffers. In some embodiments, kits of the disclosure may include components for making protein or nucleic acid arrays or libraries and thus, may include, for example, solid supports.

[0880] In some embodiments, kit components may be packaged either in aqueous media or in lyophilized form. The container means of the kits will generally include at least one vial, test tube, flask, bottle, syringe or other container means, into which a component may be placed, and suitably aliquoted. Where there is more than one kit component, (labeling reagent and label may be packaged together), kits may also generally contain second, third or other additional containers into which additional components may be separately placed. In some embodiments, kits may also comprise second container means for containing sterile, pharmaceutically acceptable buffers and/or other diluents. In some embodiments, various combinations of components may be comprised in one or more vial. Kits of the present disclosure may also typically include means for containing compounds and/or compositions of the present disclosure, e.g., proteins, nucleic acids, and any other reagent containers in close confinement for commercial sale. Such containers may include injection or blow-molded plastic containers into which desired vials are retained.

[0881] In some embodiments, kit components are provided in one and/or more liquid solutions. In some embodiments, liquid solutions are aqueous solutions, with sterile aqueous solutions being particularly used. In some embodiments, kit components may be provided as dried powder(s). When reagents and/or components are provided as dry powders, such powders may be reconstituted by the addition of suitable volumes of solvent. In some embodiments, it is envisioned that solvents may also be provided in another container means. In some embodiments, labeling dyes are provided as dried powders. In some embodiments, it is contemplated that 10, 20, 30, 40, 50, 60, 70, 80, 90, 100, 120, 120, 130, 140, 150, 160, 170, 180, 190, 200, 300, 400, 500, 600, 700, 800, 900, 1000 micrograms or at least or at most those amounts of dried dye are provided in kits of the disclosure. In such embodiments, dye may then be resuspended in any suitable solvent, such as DMSO.

[0882] In some embodiments, kits may include instructions for employing kit components as well the use of any other reagent not included in the kit. Instructions may include variations that may be implemented.

### Devices

[0883] In some embodiments, compounds and/or compositions of the present disclosure may be combined with, coated onto or embedded in a device. Devices may include, but are not limited to, dental implants, stents, bone replacements, artificial joints, valves, pacemakers and/or other implantable therapeutic device.

[0884] The present disclosure provides for devices which may incorporate viral vectors that encode one or more GCase protein molecules. These devices contain in a stable formulation the viral vectors which may be immediately delivered to a subject in need thereof, such as a human patient.

[0885] Devices for administration may be employed to deliver the viral vectors encoding GCase protein of the present disclosure according to single, multi- or split-dosing regimens taught herein.

[0886] Method and devices known in the art for multi-administration to cells, organs and tissues are contemplated for use in conjunction with the methods and compositions disclosed herein as embodiments of the present disclosure.

### VIII. Definitions

[0887] At various places in the present specification, substituents of compounds of the present disclosure are disclosed in groups or in ranges. It is specifically intended that the present disclosure include each and every individual sub-combination of the members of such groups and ranges. The following is a non-limiting list of term definitions.

[0888] Adeno-associated virus: As used herein, the term “adeno-associated virus” or “AAV” refers to members of the dependovirus genus or a variant, e.g., a functional variant, thereof. In some embodiments, the AAV is wildtype, or naturally occurring. In some embodiments, the AAV is recombinant.

[0889] AAV Particle: As used herein, an “AAV particle” refers to a particle or a virion comprising an AAV capsid, e.g., an AAV capsid variant, and a polynucleotide, e.g., a viral genome or a vector genome. In some embodiments, the viral genome of the AAV particle comprises at least one payload region and at least one ITR. In some embodiments, an AAV particle of the disclosure is an AAV particle comprising an AAV capsid polypeptide, e.g., a parent capsid sequence with at least one peptide insert. In some embodiments, the AAV particle is capable of delivering a nucleic acid, e.g., a payload region, encoding a payload to cells, typically, mammalian, e.g., human, cells. In some embodiments, an AAV particle of the present disclosure may be produced recombinantly. In some embodiments, an AAV particle may be derived from any serotype, described herein or known in the art, including combinations of serotypes (e.g., “pseudotyped” AAV) or from various genomes (e.g., single stranded or self-complementary). In some embodiments, the AAV particle may be replication defective and/or targeted. In some embodiments, the AAV particle may comprises a peptide present, e.g., inserted into, the capsid to enhance tropism for a desired target tissue. It is to be understood that reference to the AAV particle of the disclosure also includes pharmaceutical compositions thereof, even if not explicitly recited.

[0890] Amelioration: As used herein, the term “amelioration” or “ameliorating” refers to a lessening of severity of at least one indicator of a condition or disease. For example, in the context of a neurodegenerative disorder, amelioration includes the reduction or stabilization of neuron loss.

[0891] Approximately: As used herein, the term “approximately” or “about,” as applied to one or more values of interest, refers to a value that is similar to, i.e., within 10% of, a stated reference value.

[0892] Capsid: As used herein, the term “capsid” refers to the exterior, e.g., a protein shell, of a virus particle, e.g., an AAV particle, that is substantially (e.g., >50%, >60%, >70%, >80%, >90%, >95%, >99%, or 100%) protein. In some embodiments, the capsid is an AAV capsid comprising an AAV capsid protein described herein, e.g., a VP1, VP2, and/or VP3 polypeptide. The AAV capsid protein can be a wild-type AAV capsid protein or a variant, e.g., a structural and/or functional variant from a wild-type or a reference capsid protein, referred to herein as an “AAV capsid variant.” In some embodiments, the AAV capsid variant described herein has the ability to enclose, e.g., encapsulate, a viral genome and/or is capable of entry into a cell, e.g., a mammalian cell. In some embodiments, the AAV capsid variant described herein may have modified tropism compared to that of a wild-type AAV capsid, e.g., the corresponding wild-type capsid.

[0893] Central Nervous System or CNS: As used herein, “central nervous system” or “CNS” refers to one of the two major subdivisions of the nervous system, which in vertebrates includes the brain and spinal cord. The central nervous system coordinates the activity of the entire nervous system.

[0894] Cervical Region: As used herein, “cervical region” refers to the region of the spinal cord comprising the cervical vertebrae C1, C2, C3, C4, C5, C6, C7, and C8.

[0895] Cis-Elements: As used herein, cis-elements or the synonymous term “cis-regulatory elements” refer to regions of non-coding DNA which regulate the transcription of nearby genes. The Latin prefix “cis” translates to “on this side.” Cis-elements are found in the vicinity of the gene, or genes, they regulate. Examples of cis-elements include a Kozak sequence, SV40 introns, or a portion of the backbone.

[0896] CNS tissue: As used herein, “CNS tissue” or “CNS tissues” refers to the tissues of the central nervous system, which in vertebrates, include the brain and spinal cord and sub-structures thereof.

[0897] CNS structures: As used herein, “CNS structures” refers to structures of the central nervous system and sub-structures thereof. Non-limiting examples of structures in the spinal cord may include, ventral horn, dorsal horn, white matter, and nervous system pathways or nuclei within. Non-limiting examples of structures in the brain include, forebrain, midbrain, hindbrain, diencephalon, telencephalon, myelencephalon, metencephalon, mesencephalon, prosencephalon, rhombencephalon, cortices, frontal lobe, parietal lobe, temporal lobe, occipital lobe, cerebrum, thalamus, hypothalamus, tectum, tegmentum, cerebellum, pons, medulla, amygdala, hippocampus, basal ganglia, corpus callosum, pituitary gland, putamen, striatum, ventricles and sub-structures thereof.

[0898] CNS Cells: As used herein, “CNS cells” refers to cells of the central nervous system and sub-structures thereof. Non-limiting examples of CNS cells include, neurons and sub-types thereof, glia, microglia, oligodendrocytes, ependymal cells and astrocytes. Non-limiting examples of neurons include sensory neurons, motor neurons, interneurons, unipolar cells, bipolar cells, multipolar cells, pseudounipolar cells, pyramidal cells, basket cells, stellate cells, Purkinje cells, Betz cells, amacrine cells, granule cell, ovoid cell, medium aspiny neurons and large aspiny neurons.

[0899] Codon optimization: As used herein, the term “codon optimization” refers to a process of changing codons of a given gene in such a manner that the polypeptide sequence encoded by the gene remains the same.

[0900] Conservative amino acid substitution: As used herein, a “conservative amino acid substitution” is one in which the amino acid residue is replaced with an amino acid residue having a similar side chain. Families of amino acid residues having similar side chains have been defined in the art. These families include amino acids with basic side chains (e.g., lysine, arginine, histidine), acidic side chains (e.g., aspartic acid, glutamic acid), uncharged polar side chains (e.g., glycine, asparagine, glutamine, serine, threonine, tyrosine, cysteine), nonpolar side chains (e.g., alanine, valine, leucine, isoleucine, proline, phenylalanine, methionine, tryptophan), beta-branched side chains (e.g., threonine, valine, isoleucine) and aromatic side chains (e.g., tyrosine, phenylalanine, tryptophan, histidine).

[0901] Derivative: As used herein, the term “derivative” refers to a composition (e.g., sequence, compound, formulation, etc.) that is derived from, or finds its basis in, a parent composition. Non-limiting examples of a parent composition include a wild-type or original amino acid or nucleic acid sequence, or an undiluted formulation. In some embodiments, a derivative is a variant of a parent composition. A derivative may differ from the parent composition by less than about 1%, less than about 5%, less than about 10%, less than about 15%, less than about 20%, less than about 25%, less than about 30%, less than about 35%, less than about 40%, less than about 45%, or less than about 50%. In certain embodiments, a derivative may differ from a parent composition by more than about 50%. In certain embodiments, a derivative may differ from a parent composition by more than about 75%. In some embodiments, a derivative may be a fragment or truncation of a parent amino acid or nucleotide sequence. As a non-limiting example, a derivative may be a sequence with a nucleotide or peptide insert as compared to a parent nucleic acid or amino acid sequence (e.g., AAVPHP.B as compared to AAV9).

[0902] Effective amount: As used herein, the term “effective amount” of an agent is that amount sufficient to effect beneficial or desired results, for example, upon single or multiple dose administration to a subject or a cell, in curing, alleviating, relieving or improving one or more symptoms of a disorder and, as such, an “effective amount” depends upon the context in which it is being applied. For example, in the context of administering an agent that treats Parkinson Disease (PD) and related disorders, including Gaucher Disease, and Dementia with Lewy Bodies (collectively, “GBA-related disorders”), an effective amount of an agent is, for example, an amount sufficient to achieve treatment, as defined herein, of a GBA-related disorder as compared to the response obtained without administration of the agent.

[0903] Excipient: As used herein, the term “excipient” refers to an inactive substance that serves as the vehicle or medium for an active pharmaceutical agent or other active substance.

[0904] Fragment: A “fragment,” as used herein, refers to a contiguous portion of a reference sequence that retains at least one activity of the reference sequence. For example, fragments of proteins may comprise polypeptides obtained by digesting full-length protein isolated from cultured cells. A fragment may also refer to a truncation (e.g., an N-terminal and/or C-terminal truncation) of a protein or a truncation (e.g., at the 5′ and/or 3′ end) of a nucleic acid. A protein fragment may be obtained by expression of a truncated nucleic acid, such that the nucleic acid encodes a portion of the full-length protein.

[0905] GBA/Gcase protein: As used herein, the terms “Gcase”, “Gcase protein,” “GBA protein”, and “GBA1 protein” are used interchangeably to refer to a protein product or a functional portion thereof of the GBA1 gene (Ensemble gene ID: ENSG00000177628).

[0906] Humanized: As used herein, the term “humanized” refers to a non-human sequence of a polynucleotide or a polypeptide which has been altered to increase its similarity to a corresponding human sequence.

[0907] Identity: As used herein, the term “identity” refers to the overall relatedness between polymeric molecules, e.g., between oligonucleotide molecules (e.g., DNA molecules and/or RNA molecules) and/or between polypeptide molecules. Calculation of the percent identity of two polynucleotide sequences, for example, may be performed by aligning the two sequences for optimal comparison purposes (e.g., gaps can be introduced in one or both of a first and a second nucleic acid sequences for optimal alignment and non-identical sequences can be disregarded for comparison purposes). The nucleotides at corresponding nucleotide positions are then compared. When a position in the first sequence is occupied by the same nucleotide as the corresponding position in the second sequence, then the molecules are identical at that position. The percent identity between the two sequences is a function of the number of identical positions shared by the sequences, taking into account the number of gaps, and the length of each gap, which needs to be introduced for optimal alignment of the two sequences. The comparison of sequences and determination of percent identity between two sequences can be accomplished using a mathematical algorithm. For example, the percent identity between two nucleotide sequences can be determined using methods such as those described in Computational Molecular Biology, Lesk, A. M., ed., Oxford University Press, New York, 1988; Biocomputing: Informatics and Genome Projects, Smith, D. W., ed., Academic Press, New York, 1993; Sequence Analysis in Molecular Biology, von Heinje, G., Academic Press, 1987; Computer Analysis of Sequence Data, Part I, Griffin, A. M., and Griffin, H. G., eds., Humana Press, New Jersey, 1994; and Sequence Analysis Primer, Gribskov, M. and Devereux, J., eds., M Stockton Press, New York, 1991; each of which is incorporated herein by reference in its entirety. For example, the percent identity between two nucleotide sequences can be determined, for example using the algorithm of Meyers and Miller (CABIOS, 1989, 4:11-17), which has been incorporated into the ALIGN program (version 2.0) using a PAM120 weight residue table, a gap length penalty of 12 and a gap penalty of 4. The percent identity between two nucleotide sequences can, alternatively, be determined using the GAP program in the GCG software package using an NWSgapdna.CMP matrix. Methods commonly employed to determine percent identity between sequences include, but are not limited to those disclosed in Carillo, H., and Lipman, D., SIAM J Applied Math., 48:1073 (1988); incorporated herein by reference in its entirety. Techniques for determining identity are codified in publicly available computer programs. Computer software to determine homology between two sequences include, but are not limited to, GCG program package, Devereux, J., et al., Nucleic Acids Research, 12 (1), 387 (1984)), BLASTP, BLASTN, and FASTA Altschul, S. F. et al., J. Molecular Biol., 215, 403 (1990)).

[0908] Isolated: As used herein, the term “isolated” refers to a substance or entity that is altered or removed from the natural state, e.g., altered or removed from at least some of component with which it is associated in the natural state. For example, a nucleic acid or a peptide naturally present in a living animal is not “isolated,” but the same nucleic acid or peptide partially or completely separated from the coexisting materials of its natural state is “isolated.” An isolated nucleic acid or protein can exist in substantially purified form, or can exist in a non-native environment such as, for example, a host cell. Such polynucleotides could be part of a vector and/or such polynucleotides or polypeptides could be part of a composition, and still be isolated in that such vector or composition is not part of the environment in which it is found in nature. In some embodiments, an isolated nucleic acid is recombinant, e.g., incorporated into a vector.

[0909] Lumbar Region: As used herein, the term “lumbar region” refers to the region of the spinal cord comprising the lumbar vertebrae L1, L2, L3, L4, and L5.

[0910] miR binding site: As used herein, the “miR binding site” refers either to a DNA sequence corresponding to an RNA sequence that is bound by a microRNA, or to the RNA sequence that is bound by the microRNA.

[0911] Operably linked: As used herein, the phrase “operably linked” refers to a functional connection between two or more molecules, constructs, transcripts, entities, moieties, or the like.

[0912] Payload: As used herein, “payload” or “payload region” refers to one or more polynucleotides or polynucleotide regions encoded by or within a viral genome or an expression product of such polynucleotide or polynucleotide region, e.g., a transgene, a polynucleotide encoding a polypeptide.

[0913] Payload construct: As used herein, “payload construct” is one or more polynucleotide regions encoding or comprising a payload that is flanked on one or both sides by an inverted terminal repeat (ITR) sequence. The payload construct is a template that is replicated in a viral production cell to produce a viral genome.

[0914] Payload construct vector: As used herein, “payload construct vector” is a vector encoding or comprising a payload construct, and regulatory regions for replication and expression in bacterial cells. The payload construct vector may also comprise a component for viral expression in a viral replication cell.

[0915] Pharmaceutically acceptable: The phrase “pharmaceutically acceptable” is employed herein to refer to those compounds, materials, compositions, and/or dosage forms which are suitable for use in contact with the tissues of human beings and animals.

[0916] Pharmaceutically acceptable excipients: As used herein, the term “pharmaceutically acceptable excipient,” as used herein, refers to any ingredient other than active agents (e.g., as described herein) present in pharmaceutical compositions that can function as vehicles for suspending and/or dissolving active agents.

[0917] Pharmaceutically acceptable salts: Pharmaceutically acceptable salts of the compounds described herein are forms of the disclosed compounds wherein the acid or base moiety is in its salt form (e.g., as generated by reacting a free base group with a suitable organic acid). Examples of pharmaceutically acceptable salts include, but are not limited to, mineral or organic acid salts of basic residues such as amines; alkali or organic salts of acidic residues such as carboxylic acids; and the like.

[0918] Pharmaceutical Composition: As used herein, the term “pharmaceutical composition” or pharmaceutically acceptable composition” comprises AAV polynucleotides, AAV genomes, or AAV particle and one or more pharmaceutically acceptable excipients, solvents, adjuvants, and/or the like.

[0919] Preventing: As used herein, the term “preventing” refers to partially or completely delaying onset of an infection, disease, disorder and/or condition; partially or completely delaying onset of one or more symptoms, features, or clinical manifestations of a particular infection, disease, disorder, and/or condition; partially or completely delaying onset of one or more symptoms, features, or manifestations of a particular infection, disease, disorder, and/or condition; partially or completely delaying progression from an infection, a particular disease, disorder and/or condition; and/or decreasing the risk of developing pathology associated with the infection, the disease, disorder, and/or condition.

[0920] Purified: As used herein, the term “purify” means to make substantially pure or clear from one or more unwanted components, material defilement, admixture or imperfection. “Purified” refers to the state of being pure. “Purification” refers to the process of making pure. As used herein, a substance is “pure” if it is substantially free of (substantially isolated from) one or more components, e.g., one or more components found in a native context.

[0921] Region: As used herein, the term “region” refers to a zone or general area. In some embodiments, when referring to a protein or protein module, a region may comprise a linear sequence of amino acids along the protein or protein module or may comprise a three dimensional area, an epitope and/or a cluster of epitopes. In some embodiments, regions comprise terminal regions. As used herein, the term “terminal region” refers to regions located at the ends or termini of a given agent. When referring to proteins, terminal regions may comprise N- and/or C-termini. N-termini refer to the end of a protein comprising an amino acid with a free amino group. C-termini refer to the end of a protein comprising an amino acid with a free carboxyl group. N- and/or C-terminal regions may comprise the N- and/or C-termini as well as surrounding amino acids.

[0922] Sample: As used herein, the term “sample” refers to an aliquot or portion taken from a source and/or provided for analysis or processing. In some embodiments, a sample is from a biological source such as a tissue, cell or component part (e.g. a body fluid, including but not limited to blood, mucus, lymphatic fluid, synovial fluid, cerebrospinal fluid, saliva, amniotic fluid, amniotic cord blood, urine, vaginal fluid and semen).

[0923] Serotype: As used herein, the term “serotype” refers to distinct variations in a capsid of an AAV based on surface antigens which allow epidemiologic classifications of the AAVs at the sub-species level.

[0924] Signal Sequences: As used herein, the phrase “signal sequences” refers to a sequence which can direct the transport or localization.

[0925] Similarity: As used herein, the term “similarity” refers to the overall relatedness between polymeric molecules, e.g., between polynucleotide molecules (e.g., DNA molecules and/or RNA molecules) and/or between polypeptide molecules. Calculation of percent similarity of polymeric molecules to one another can be performed in the same manner as a calculation of percent identity, except that calculation of percent similarity takes into account conservative substitutions as is understood in the art.

[0926] Spacer: As used herein, a “spacer” is generally any selected nucleic acid sequence of, e.g., 1, 2, 3, 4, 5, 6, 7, 8, 9, or 10 nucleotides in length, which is located between two or more consecutive miR binding site sequences.

[0927] Subject: As used herein, the term “subject” or “patient” refers to any organism to which a composition in accordance with the disclosure may be administered, e.g., for experimental, diagnostic, prophylactic, and/or therapeutic purposes. Similarly, “subject” or “patient” refers to an organism who may seek, who may require, who is receiving, or who will receive treatment or who is under care by a trained professional for a particular disease or condition. Typical subjects include animals (e.g., mammals such as mice, rats, rabbits, non-human primates, and humans). In certain embodiments, a subject or patient may be susceptible to or suspected of having a GBA-related disorder. In certain embodiments, a subject or patient may be diagnosed with PD, Gaucher Disease, or Dementia with Lewy Bodies disease.

[0928] Substantially: As used herein, the term “substantially” refers to the qualitative condition of exhibiting total or near-total extent or degree of a characteristic or property of interest. One of ordinary skill in the biological arts will understand that biological and chemical phenomena rarely, if ever, go to completion and/or proceed to completeness or achieve or avoid an absolute result. The term “substantially” is therefore used herein to capture the potential lack of completeness inherent in many biological and chemical phenomena.

[0929] Suffering from: An individual who is “suffering from” a disease, disorder, and/or condition has been diagnosed with or displays one or more symptoms of a disease, disorder, and/or condition.

[0930] Susceptible to: An individual who is “susceptible to” a disease, disorder, and/or condition has not been diagnosed with and/or may not exhibit symptoms of the disease, disorder, and/or condition but harbors a propensity to develop a disease or its symptoms. In some embodiments, an individual who is susceptible to a disease, disorder, and/or condition (for example, cancer) may be characterized by one or more of the following: (1) a genetic mutation associated with development of the disease, disorder, and/or condition; (2) a genetic polymorphism associated with development of the disease, disorder, and/or condition; (3) increased and/or decreased expression and/or activity of a protein and/or nucleic acid associated with the disease, disorder, and/or condition; (4) habits and/or lifestyles associated with development of the disease, disorder, and/or condition; (5) a family history of the disease, disorder, and/or condition; and (6) exposure to and/or infection with a microbe associated with development of the disease, disorder, and/or condition. In some embodiments, an individual who is susceptible to a disease, disorder, and/or condition will develop the disease, disorder, and/or condition. In some embodiments, an individual who is susceptible to a disease, disorder, and/or condition will not develop the disease, disorder, and/or condition.

[0931] Therapeutic Agent: The term “therapeutic agent” refers to any agent that, when administered to a subject has a therapeutic, diagnostic, and/or prophylactic effect and/or elicits a desired biological and/or pharmacological effect.

[0932] Therapeutically effective amount: As used herein, the term “therapeutically effective amount” means an amount of an agent to be delivered (e.g., nucleic acid, drug, therapeutic agent, diagnostic agent, prophylactic agent, etc.) that is sufficient, when administered to a subject suffering from or susceptible to an infection, disease, disorder, and/or condition, to treat, improve symptoms of, delay progression of symptoms, diagnose, prevent, and/or delay the onset of the infection, disease, disorder, and/or condition. In some embodiments, a therapeutically effective amount is provided in a single dose. In some embodiments, a therapeutically effective amount is administered in a dosage regimen comprising a plurality of doses. Those skilled in the art will appreciate that in some embodiments, a unit dosage form may be considered to comprise a therapeutically effective amount of a particular agent or entity if it comprises an amount that is effective when administered as part of such a dosage regimen.

[0933] Thoracic Region: As used herein, a “thoracic region” refers to a region of the spinal cord comprising the thoracic vertebrae T1, T2, T3, T4, T5, T6, T7, T8, T9, T10, T11, and T12.

[0934] Treating: As used herein, the term “treating” refers to partially or completely alleviating, ameliorating, improving, relieving, reversing, delaying onset of, inhibiting progression of, reducing severity of, and/or reducing incidence of one or more symptoms or features of a particular infection, disease, disorder, and/or condition. Treatment may be administered to a subject who does not exhibit signs of a disease, disorder, and/or condition and/or to a subject who exhibits only early signs of a disease, disorder, and/or condition for the purpose of decreasing the risk of developing pathology associated with the disease, disorder, and/or condition.

[0935] Unmodified: As used herein, “unmodified” refers to any substance, compound or molecule prior to being changed in any way. Unmodified may, but does not always, refer to the wild-type or native form of a biomolecule or entity. Molecules or entities may undergo a series of modifications whereby each modified product may serve as the “unmodified” starting molecule or entity for a subsequent modification.

[0936] Variant: The term “variant” refers to a polypeptide or polynucleotide that has an amino acid or a nucleotide sequence that is substantially identical, e.g., having at least 70%, 75%, 80%, 85%, 90%, 95% or 99% sequence identity to a reference sequence. In some embodiments, the variant is a functional variant. As used herein, the term “functional variant” refers to a polypeptide variant or a polynucleotide variant that has at least one activity of the reference sequence.

[0937] Vector: As used herein, a “vector” is any molecule or moiety which transports, transduces or otherwise acts as a carrier of a heterologous molecule. Vectors of the present disclosure may be produced recombinantly and may be based on and/or may comprise adeno-associated virus (AAV) parent or reference sequence(s). Such parent or reference AAV sequences may serve as an original, second, third or subsequent sequence for engineering vectors. In non-limiting examples, such parent or reference AAV sequences may comprise any one or more of the following sequences: a polynucleotide sequence encoding a polypeptide or multi-polypeptide, having a sequence that may be wild-type or modified from wild-type and which sequence may encode full-length or partial sequence of a protein, protein domain, or one or more subunits of GCase protein and variants thereof; a polynucleotide encoding GCase protein and variants thereof, having a sequence that may be wild-type or modified from wild-type; and a transgene encoding GCase protein and variants thereof that may or may not be modified from wild-type sequence.

[0938] Viral genome: As used herein, a “viral genome” or “vector genome” is a polynucleotide comprising at least one inverted terminal repeat (ITR) and at least one encoded payload. A viral genome encodes at least one copy of the payload.

### Examples

[0939] The present disclosure is further illustrated by the following non-limiting examples. Experiments described in the Examples establish that enhanced AAV-based GCase gene therapy treatments are superior to and/or additive with wild-type GCase-based treatment in ameliorating GBA1-related disorders.

### Cell Lines, Tissues, and Animal Models

[0940] In vitro experiments: Human fibroblasts from GBA1 patients (all 3 types) were obtained from Corielle. The following Gaucher patient fibroblasts were chosen based on significantly depleted GCase activity (4-6%) and availability of age- and race-matched healthy control fibroblasts: GM04394-fibroblast, GM00852-fibroblast, GM00877-fibroblast, GM05758-fibroblast from skin/inguinal area, and GM02937-fibroblast from skin/unspecified (all available from Corielle).

[0941] GBA1-4L/PS-NA primary neurons can be generated from pregnant GBA1-4L/PS-NA females from QPS. GBA1-knockout (GBA1-KO) neuroblastoma cell line (IMR-32 background, available from ATCC) was obtained from Synthego.

[0942] Animal models: GBA1-4L/PS-NA mouse models (available at QPS): 4L/PS-NA mice express low level of prosaposin and saposin C, as well as GCase with a point mutation at position V394L/V394L. Strong enlargement of leukocytes and macrophages in visceral organs like spleen, thymus, lung and liver develop as early as 5 week of age. Most deficits and reduced muscle strength accompanied by neuroinflammation in the cortex, and hippocampus increase as animals age. There is significant increase in glucosylceramide and glucosylsphingosine. GBA1-4L/PS-NA can survival up to 22 weeks. Homozygous Prnp-SNCA-A53T (M83) mice, by 8-months of age, develop α-syn aggregates and progressively severe motor phenotype.

### Example 1. Vector Design and Synthesis

[0943] An AAV viral genome expressing a payload region comprising a polynucleotide encoding a human GBA1 polypeptide is generated. The viral genome comprises polynucleotides encoding an AAV capsid of a serotype provided in Table 1. A promoter region regulates expression of the payload region. Widespread GBA1 distribution is achieved by use of a ubiquitous promoter, such as CBA, to achieve transduction within different CNS cell types.

[0944] Single-stranded codon optimized GBA1 cDNA sequence under ubiquitous CBA promoter packaged within AAV2 ITRs is generated (wtGBA). Enhanced GBA1 (enGBA) constructs (see Examples 2-5) are generated and compared against wtGBA. wtGBA1 and GFP reporter vectors are compared side-by-side to test multiplicity of infection for in vitro experiments. The final AAV transgene design nominations are made based on vectorized in vitro experiments and tested in the proposed in vivo models, including those used for GLP and tolerability studies.

[0945] PD-GBA1 patients demonstrate a global reduction in GCase levels in the CNS. Consequently, high GCase levels in CSF, caudate, substantia nigra, cortex and cerebellum is targeted. Although the disease pathology is largely neuronal, the therapeutic strategy is expected to benefit by transduction of other CNS cell-types, e.g. astrocytes, via cross-correction benefit.

[0946] In addition to PD-GBA, efficacy in secondary disease indications in patients with GBA1 mutations is tested, including Gaucher disease (including Neuronopathic Gaucher disease) and Dementia with Lewy bodies.

[0947] Transgenes designed as described above are tested for plasmid-level expression: all cassettes are engineered in single stranded AAV transgene configuration driven by ubiquitous CBA promoter flanked by AAV2 ITRs. The following transgene constructs are engineered and synthesized: 1) codon optimized GBA1 cDNA construct; 2) enhanced GBA1 construct comprising GBA1 cDNA and further encoding prosaposin/saposin C in the same transgene (optimal co-activator gene and linker sequences are selected for vectorization based on plasmid-level expression analysis); 3) enhanced GBA1 constructs comprising a cell-penetration peptide; and 4) enhanced GBA1 constructs comprising lysosomal targeting peptides (LTP); and 5) combinatorial enhanced GBA1 constructs comprising a combination of GBA1 cDNA, saposin sequence(s), lysosomal targeting sequence(s) and/or cell penetrating peptide sequence(s).

[0948] These constructs are tested for expression/GCase activity in cell culture with ITR plasmid transfections as a first pass. Specifically, plasmids are tested in CHO/HEK-293 cells at 48 hours post transfections. Both lysates and media are assessed for expression. Based on the results, GBA1 transgene ITR cassettes (wt, enGBA1 and enGBAcombo constructs) are selected for vectorization and evaluation within in vitro disease model setting. Upon plasmid-level expression/GCase activity confirmation, select AAV ITR cassettes (wtGBA, enGBA1 and enGBAcombo) are packaged into HEK 293 small-scale AAV6 or AAV2 preps for initial in vitro evaluations.

### Example 2. Co-Administration of SapC Enhances GBA1 Gene Therapy

[0949] Viral genomes encoding a GBA1 protein can also be designed to further encode an enhancement element, e.g., a prosaposin protein, a Saposin C protein, or functional variant thereof. GCase coactivator Saposin C (SapC) is one of the cleavage products of saposin precursor protein Prosaposin. Saposin C is the essential activator of GCase lysosomal enzyme. In mouse models of PD-GBA1 and Gaucher disease, the combination of loss of function in GBA1 and Saposin C results in significantly exacerbated disease phenotype. Thus, AAV mediated co-delivery of GBA1 (e.g., a viral genome encoding a GBA1 protein, e.g., comprising the nucleotide sequence of SEQ ID NO: 1772, 1773, 1776, 1777, 1780, or 1781, or a functional variant thereof) and cDNA encoding a prosaposin protein (e.g., a prosaposin protein comprising the amino acid sequence of SEQ ID NO: 1750 or 1758, or a functional variant thereof; or encoded by a nucleotide sequence comprising SEQ ID NO: 1858 or 1859, or a functional variant thereof) or a Saposin C (SapC) protein or functional variant thereof (e.g., a SapC protein or functional variant thereof comprising the amino acid sequence of SEQ ID NO: 1788, 1789, 1791, or 1792; or encoded by the nucleotide sequence of SEQ ID NO: 1786, 1787, 1790, or 1791) is tested to increase potency of GBA1 gene therapy by enhancing catalytic activity of GCase enzyme.

### Example 3. Cell-Penetration Peptides Enhance Cellular Penetration/Uptake

[0950] Viral genomes encoding a GBA1 protein can also be designed to further encode an enhancement element, e.g., a cell penetrating peptide or functional variant thereof. Without wishing to be bound by theory, it is believed that a cell-penetration peptide (CPP) signal added to the GCase sequence of the transgenes of the disclosure results in increased cellular uptake of secreted GCase product in circulation, in cerebrospinal fluid, and in interstitial fluid from AAV-transduced cells; and this enhanced cell penetration thus increases cross-correction potential of the secreted GCase enzyme. Exemplary CPPs used herein include: HIV-derived TAT peptide (e.g., comprising the amino acid sequence of 1794 and/or encoded by the nucleotide sequence of SEQ ID NO: 1794), human apoliprotein B receptor binding domain (e.g., comprising the amino acid sequence of 1796 and/or encoded by the nucleotide sequence of SEQ ID NO: 1795), and/or human apolipoprotein E-II receptor binding domain (e.g., comprising the amino acid sequence of 1798 and/or encoded by the nucleotide sequence of SEQ ID NO: 1797).

### Example 4. CMA Recognition Sequences Enhance Intracellular Lysosomal Targeting

[0951] Viral genomes encoding a GBA1 protein can also be designed to further encode an enhancement element, e.g., a lysosomal targeting sequence or functional variant thereof.

[0952] Chaperone sequences including glycosylation-independent lysosomal targeting peptides (which is an M-6-P independent lysosomal targeting mechanism) have demonstrated ability to enable enhanced delivery of lysosomal enzyme product. GBA1 utilizes LIMP-2 (encoded by SCARB2 gene) as the lysosomal surface receptor (important for lysosomal localization). Co-delivery of SCARB2 with GBA1 provides an alternative strategy to enhance lysosomal targeting of GCase. Chaperone-mediated autophagy signals are incorporated into transgenes of the disclosure to increase lysosomal targeting of the GCase enzyme. Highly conserved recognition sequences of chaperone-mediated-autophagy (CMA) pathway is analyzed for improved lysosomal targeting of GCase enzyme. Such sequences include, for example, RNase A-derived CMA recognition sequence, HSC70-derived CMA recognition sequence, or hemoglobin-derived CMA recognition sequence.

[0953] Lysosomal targeting sequences (LTS) are also included in viral genomes encoding a GBA1 protein described herein. Exemplary LTS peptides used herein include LTS1 (e.g., comprising the amino acid sequence of SEQ ID NO 1800 and/or encoded by the nucleotide sequence of SEQ ID NO: 1799), LTS2 (e.g., comprising the amino acid sequence of SEQ ID NO 1802 and/or encoded by the nucleotide sequence of SEQ ID NO: 1801), LTS3 (e.g., comprising the amino acid sequence of SEQ ID NO 1804 and/or encoded by the nucleotide sequence of SEQ ID NO: 1803), LTS4 (e.g., comprising the amino acid sequence of SEQ ID NO 1806 and/or encoded by the nucleotide sequence of SEQ ID NO: 1805), and/or LTS5 (e.g., comprising the amino acid sequence of SEQ ID NO 1808 and/or encoded by the nucleotide sequence of SEQ ID NO: 1807).

### Example 5. Combinatorial Enhancements

[0954] Combinations of the aforementioned enhancement elements (Examples 2-4) are tested for ability of different combinations to additively or synergistically increase potency of AAV mediated delivery of GCase enzyme in vivo (by various possible combinations of enhanced cross-correction, enhanced lysosomal targeting, enhanced catalytic activity). These combinatorial approaches are also compared against a reference transgene (SEQ ID NO: 1759) for various aforementioned outcomes. Without wishing to be bound by theory, it is believed that transgene-level enhancements can increase the potency of AAV gene therapy and reduce the minimal efficacious dose for in vivo evaluations and clinic applications.

### Example 6. In Vitro Screen

[0955] Early in vitro experiments are designed to enable validation of the functional enhancements made in the GBA1 transgene by conducting side-by-side comparison against a reference GBA1 construct (e.g., SEQ ID NO: 1759). Experiments are run as AAV vectorized transduction studies on in vitro models of GBA1 LOF (patient fibroblasts or GBA1 knockout mouse primary neurons). Dose response is determined. Post-translational modifications and activity of the final GCase product can also be determined.

[0956] In vitro evaluations with AAV vectors packaging wtGBA, enGBA1 and enGBAcombo are carried out on patient fibroblasts with GBA1 mutations and primary neurons derived from WT and/or 4L/PS-NA GBA1 mouse model. In preparation for generating 3-point dose-response curves of all AAV.GBA1 vectors generated, AAV6.CBA.Luciferase reporter-gene transduction assay is performed on the 2 cell lines to verify optimal experimental conditions, e.g. Multiplicity Of Infection (MOI) for AAV6 vectors to be applied across in vitro screening. Once the in vitro experiments are optimized, head-to-head comparisons to identify optimal enGBA1 transgene configurations for further in vivo evaluations can be conducted.

[0957] In vitro dose-response comparisons of AAV-enGBA1 or AAV-wtGBA1 constructs (e.g., any one of SEQ ID NOs: 1759-1771 or 1809-1828, e.g., as described in Tables 18-21 or or 29-32) for GCase activity: To determine if GBA1 transgene enhancement strategies confer increased GCase activity in disease-relevant in vitro models, human fibroblasts with and without GBA1 mutations, and WT/GBA1 mutant mouse primary neurons are treated with AAV6 vectors packaging enhanced GBA1 viral genome variants at 3 different MOIs. At terminal time point, secreted and intracellular GCase expression and activity are measured in both media and cell lysate. Additionally, ddPCR based vector genome analysis is conducted to ensure successful in vitro gene transfer across different conditions.

[0958] In vitro comparison of AAV-enGBA1 constructs for subcellular localization: Whether the GBA1 transgene enhancement strategies confer increased lysosomal localization properties in healthy and disease relevant in vitro models is determined. Human fibroblasts with/without GBA1 mutations; and WT/GBA1 mutant mouse primary neurons are treated with AAV6 vectors packaging enhanced GBA1 viral genome variants. At terminal time point, cells are fixed and co-immunostained for HA (AAV transduction) and lysosomal markers (e.g. Lamp1). Transduction efficiency and % colocalization in the lysosomes are assessed for all AAV vectors using the Bio-Tek Cytation 5 for image analysis and quantification.

[0959] In vitro comparison of AAV-enGBA1 constructs for enzyme cross-correction: In addition to intracellular and secreted GCase activity, AAV-GBA1 transgene enhancement strategies are assessed for cross-correction properties in disease relevant in vitro conditions. Non-GBA/GBA1 human fibroblasts and GBA1 mutant/WT mouse primary neurons are treated with AAV6 vectors packaging enhanced GBA1 viral genomes. Conditioned media from transduced cells is collected at 24-, 48- and 72-hours post AAV treatments. In order to recapitulate in vivo cross-correction, untreated human fibroblasts and mouse primary neurons are then treated with different conditioned media for 24 hours. At this point, a subset of wells is co-immunostained for HA (visualization of cross-corrected GCase protein product) and lysosomal markers (e.g. Lamp1). Another subset of wells is lysed and evaluated for GCase activity. Cross-correction efficiency and % colocalization in the lysosomes is visualized and quantified for all AAV vector treatments.

[0960] In vitro GBA1 MOI dose-response study with AAVwtGBA1 and AAVenGBA1 vectors: Small-scale preps of optimal AAV capsid packaging wtGBA1 and enGBA1 constructs. A 3-point dose-response infection study is conducted with wtGBA1 and enGBA1 packaging AAVs. GBA1-KO neuroblastoma cells (wtGBA1 neuroblastoma control) and Gaucher disease patient fibroblasts (healthy controls) are used for evaluations.

[0961] Select wtGBA1 or enGBA1 constructs are identified for further analysis in vivo.

### Example 7. Assay Development

[0962] One method of detecting GCase activity involves measuring turnover of an artificial substrate, 4-Methylumbelliferyl β-D-galactopyranoside (4-MUG) as described, for example in Rogers et al., “Discovery, SAR, and biological evaluation of non-inhibitory chaperones of glucocerebrosidase.” (2010), incorporated herein by reference in its entirety. The 4-MUG assay is used to determine GCase activity and GCase concentration in cell lysates.

[0963] Another method of detecting GCase activity involves use of a SensoLyte Blue Glucocerebrosidase assay (AnaSpec, Fremont, CA), a fluorometric assay, according to the manufacturer's instructions. Sensolyte Blue Glucocerebrosidase assay detects GCase activity using a fluorogenic analog-substrate, wherein the output is fluorescent excitation/emission at 365 nm/445 nm on a standard plate reader.

[0964] Fluorescence-based detection of hGBA1 in mouse tissue, and assessment of hGCase activity in mouse can be determined using the methods as described in Morabito, Giuseppe et al., “AAV-PHP. B-mediated global-scale expression in the mouse nervous system enables GBA1 gene therapy for wide protection from synucleinopathy.” Molecular Therapy 25.12 (2017): 2727-2742, the contents of which are incorporated by reference herein in their entirety. Alternative methods of visualizing GCase activity are described, for example, in Chao, Daniela Herrera Moro et al., “Visualization of active glucocerebrosidase in rodent brain with high spatial resolution following in situ labeling with fluorescent activity based probes.” PLOS One 10.9 (2015), the contents of which are incorporated herein by reference in their entirety. See also Witte, Martin D., et al. Nature Chemical Biology 6, 907-13 (2010), incorporated herein by reference in its entirety, describing “ultra-sensitive” cyclophellitol β-oxide (CBE) based probes for highly specific GBA1 labeling in vitro and in vivo. CBE, a GCase inhibitor, irreversibly binds GBA1 and inhibits its GCase activity, has been shown to cross the blood-brain-barrier, and induces biochemical, clinical and histological manifestations of Gaucher disease (Kuo, Chi-Lin, et al. “In vivo inactivation of glycosidases by conduritol B epoxide and cyclophellitol as revealed by activity-based protein profiling.” The FEBS journal 286.3 (2019): 584-600, incorporated herein by reference in its entirety).

[0965] For these assays, GCase/GBA1 protein concentration and activity are determined and normalized to total protein/activity levels in lysate. Negative control lysates are prepared from, for example, hippocampus and brainstem of vehicle (PBS) treated 6-8 week C57/B16 female mice (n=4). Positive control lysates are from human recombinant GBA1-infected/expressing cells. Inhibitor control lysates are from human recombinant GBA+GBA1-inhibitor infected/expressing cells to test specificity of the enzyme. An example GCase inhibitor for use in such studies is CBE. Vehicle/Lysis buffer/matrix controls consist of lysis buffer (Sigma) and substrate only. Background controls consist of substrate only. Minimal protein concentrations needed to observe GCase activity are identified by analysis of additional dilutions of lysate.

[0966] An assay is validated for evaluating increase in glucosylceramidase activity and glucosylceramidase protein concentration within in vitro GBA1 disease models (Gaucher patient fibroblasts and GBA1-KO neuroblastoma cells) post AAV administration.

### Example 8. In Vivo Screen

[0967] In vivo target engagement in GBA1 disease model: After in vitro screening, target engagement in a GBA1 mouse model (GBA1-4L/PS-NA) is demonstrated. A side-by-side comparison with AAV-wtGBA1 can be used to further bolster findings and demonstrate efficacy in vivo. In vivo evaluations determine whether AAV9-enGBA1 and AAV9-enGBAcombo candidate treatments selected during in vitro evaluations result in comparable/significantly higher GCase activity and reduction in GluCer and Glucosylsphingosine substrate-level reduction benefit as compared to AAV9-GBA1 reference construct in GBA1 a mouse model.

[0968] Up to 10 top enGBA1 constructs with significantly favorable attributes as compared to GBA1 reference construct using the GBA1 4L/PS-NA mouse model (available at QPS) are tested. AAV-untreated non transgenic (NT) mice are used as controls for biochemical analyses. GBA1-4L/PS-NA mice show relevant features of human GBA1 mutations including significantly reduced GCase activity and increased Glucosylceramide and Glucosylsphingosine as early as 5 weeks post birth. Neuroinflammation in the CTx and hippocampus is also seen in these mice.

[0969] In order to assess target engagement in the GBA1 disease model, intrastriatal administration of AAV9 vectors packaging GBA1 reference construct and up to top 10 of the enhanced GBA1 variant viral genomes at three doses 5×10⁹, 1×10¹⁰, 5×10¹⁰ vg/inj via bilateral injections is performed. Animals are euthanized 4 weeks post injections and CNS, peripheral tissues, and fluid compartments (serum and CSF) are collected for AAV biodistribution and transduction (GCase activities and GluCer substrate levels) analyses. Successful/lead candidates cause modest increase (~30% over baseline) of GCase activity in GBA1 animal models. Untreated strain- and age-matched WT mice are included to compare physiological levels of GCase and GluCer in healthy animals. Thus, intrastriatal enGBA/enGBAcombo treatments result in equivalent/superior physiological restoration of GCase enzyme levels in the CNS tissues and CSF of GBA1 mutant mice as compared to GBA1 reference construct. Concomitantly similar comparison is also made for Glucosylceramide or Glucosylsphingosine levels for different treatments for substrate reduction. Up to 3 top AAV9-enGBA1 treatments are advanced for efficacy studies.

### Example 9. In Vivo Efficacy Evaluations

[0970] Dose selection: In vivo target engagement hits identified in Examples 2-5 are evaluated for GCase expression, target engagement, and efficacy based on readouts in murine disease models of GBA1-PD. For efficacy determining in vivo studies, both GBA1-4L/PS-NA and SNCA-A53T (M83) mice are used; WT animals are compared as controls. Both mouse models (GBA1-4L/PS-NA and M83), n=6-10 mice per group, receive bilateral intrastriatal injections of 5×10⁹, 1×10¹⁰, 5×10¹⁰ vg/inj (or other appropriate concentration based on study results) of the top hits. Mice are euthanized 4 or 8 weeks post-dose. CNS and peripheral tissues and fluid samples including cortex, striatum, thalamus, brain stem, cerebellum, CSF, serum and liver are collected. GCase expression and activity and GluCer substrate levels are measured. Early immunohistochemical readouts using Ibal, GFAP, and H&E stains of mouse brain, spinal cord and liver are performed in order to confirm tolerability at various AAV doses.

[0971] Efficacy evaluations will determine whether AAV-enGBA1 candidate treatments result in efficacious and sustained increase in GCase activity in the brain resulting in reduction in GCase substrate within GBA1-4L/PS-NA mouse model. Based on dose selection studies, AAV vectors that are well-tolerated and showing>30% increase in GBA1 protein expression in relevant CNS tissues are further tested in a time-response study. Briefly, GBA1-4L/PS-NA mice (n=6-10) are injected with an intrastriatal injection of lead constructs (dose determined based on dose-selection study), multiple CNS and peripheral tissues and fluid compartments (serum and CSF) are collected at various time-points (e.g. 4, 8 and 12 weeks) and GCase expression and activities, substrate reduction in the CNS and periphery are quantified. Lysosomal localization of the transduced GCase enzyme product are confirmed with immune-colocalization of AAV transduction with lysosomal marker.

[0972] Further evaluations will assess whether AAV-enGBA1 candidate treatments result in efficacious and sustained increase in GCase activity in the brain resulting in reduction of α-Syn pathology within GBA1/α-Synuclein A53T mouse model. Based on dose selection study, AAV vectors that are well-tolerated and showing>30% increase in GBA1 protein expression in relevant CNS tissues are further tested in SNCA-A53T (M83) mouse model. M83 mice are known to start developing α-syn pathology at 6-7 months of age with progressive motor deficits. M83 mice (n=8-12) are injected with most efficacious constructs (Intrastriatal; dose according to study results) at ~6 months of age; and evaluated for GCase expression and activity, and α-syn pathology 3 months post administration. Previous studies have shown therapeutic benefit of AAV-GBA1 in reducing α-syn aggregates in SNCA transgenic mouse models. Here, in addition to GCase expression and activities, AAV-enGBA1 candidate treatments which result in physiological restoration of GCase enzyme levels (>30%) in the CNS tissue and CSF are evaluated for α-syn pathology reduction in A53T (M83) mice using immunohistochemical analyses.

### Example 10. Natural History Study

[0973] In parallel with Stage 1 screening efforts, phenotypic, biochemical and immunohistochemical analysis were performed on 4L/PS-NA, 4L control, and wild-type mice to establish disease-relevant efficacy readouts and timelines.

[0974] GBA1 and Saposin C expression levels were determined in forebrain, midbrain, and hindbrain sections of the mice by LC-MS/MS, and were normalized to actin levels. Consistently across 5, 12, and 18 weeks of age, in all regions of the brain, 4L/PS-NA mice had lower GBA1 expression levels compared to that of wild-type mice and similar levels of GBA1 expression as 4L mice (Table 11). The brain of wild-type mice generally showed a trend of increased GBA1 expression in the hindbrain relative to the midbrain the forebrain (Table 11). Additionally, a decrease in GBA1 levels in the forebrain and midbrain was observed in the wild-type mice between 5 weeks and 12-18 weeks of age.

TABLE 11
Avg. GBA1 level (GBA/Actin) in GBA1-related disease mouse models

| | 5 Weeks | | | 12 Weeks | | | 18 Weeks | | |
|---|---|---|---|---|---|---|---|---|---|
| | Region of Brain | | | Region of Brain | | | Region of Brain | | |
| Animal | Fore- | Mid- | Hind- | Fore- | Mid- | Hind- | Fore- | Mid- | Hind- |
| Model | brain | brain | brain | brain | brain | brain | brain | brain | brain |
| 4L/PS- | 473.5 | 715.2 | 996.7 | 591.0 | 760.5 | 779.0 | 801.8 | 726.6 | 907.6 |
| NA | | | | | | | | | |
| 4L | 687.5 | 676.8 | 939.8 | 614.5 | 764.9 | 702.8 | 512.3 | 691.8 | 1094.2 |
| Control | | | | | | | | | |
| Wild- | 3463.2 | 3644.1 | 5377.4 | 2616.6 | 2902.2 | 4468.3 | 2551.3 | 3273.6 | 5129.8 |
| type | | | | | | | | | |

[0975] Saposin C (SapC)/Actin levels in 4L/PS-NA mice were lower than those observed in the 4L or wild-type mice in the forebrain, midbrain, and hindbrain (Table 12). SapC levels increased in the brains of wild-type mice, with the highest level quantified at 18 weeks of age (Table 12).

TABLE 12
Avg. SapC level (SapC/Actin) in GBA1-related disease mouse models

| | 5 Weeks | | | 12 Weeks | | | 18 Weeks | | |
|---|---|---|---|---|---|---|---|---|---|
| | Region of Brain | | | Region of Brain | | | Region of Brain | | |
| Animal | Fore- | Mid- | Hind- | Fore- | Mid- | Hind- | Fore- | Mid- | Hind- |
| Model | brain | brain | brain | brain | brain | brain | brain | brain | brain |
| 4L/PS- | 232.1 | 289.6 | 430.6 | 315.8 | 432.1 | 523.3 | 227.5 | 552.8 | 591.4 |
| NA | | | | | | | | | |
| 4L | 748.6 | 1102.9 | 1769.3 | 844.2 | 1486.5 | 1506.3 | 646.5 | 1123.6 | 1546.4 |
| Control | | | | | | | | | |
| Wild- | 1500.3 | 2283.3 | 3087.9 | 1662.3 | 1971.0 | 2968.9 | 1656.3 | 2143.9 | 3253.1 |
| type | | | | | | | | | |

[0976] At five-weeks, 12 weeks, and 18 weeks of age, GCase activity also was measured in forebrain, midbrain and hindbrain tissue sections of 4L/PS-NA (model having decreased GCase and prosaposin), 4L control (model having decreased GCase) and wild-type (normal GCase and prosaposin) mice (Table 13).

[0977] At 5 weeks of age, decreased GCase activity was confirmed in both the 4L/PS-NA and 4L control mice, with significant GCase deficits as compared to wild-type mice. GCase activity was not significantly different between the 4L/PS-NA and 4L control mice (Table 13).

TABLE 13
Avg. GCase activity [RFU per mL] in GBA1-related disease mouse models

| | 5 Weeks | | | 12 Weeks | | | 18 Weeks | | |
|---|---|---|---|---|---|---|---|---|---|
| | Region of Brain | | | Region of Brain | | | Region of Brain | | |
| Animal | Fore- | Mid- | Hind- | Fore- | Mid- | Hind- | Fore- | Mid- | Hind- |
| Model | brain | brain | brain | brain | brain | brain | brain | brain | brain |
| 4L/PS- | 4318.36 | 6448.92 | 5581.51 | 6343.1 | 6423.7 | 5386.7 | 4109.2 | 6466.4 | 5981.6 |
| NA | | | | | | | | | |
| 4L | 4442.15 | 5614.69 | 5598.62 | 4969.0 | 4640.2 | 6798.4 | 5837.2 | 5915.6 | 8310.4 |
| Control | | | | | | | | | |
| Wild- | 9531.29 | 10448.20 | 10520.70 | 8379.2 | 7596.1 | 9286.1 | 5488.1 | 9730.8 | 8227.2 |
| type | | | | | | | | | |

[0978] Similarly, in 12 and 18 weeks old mice, decreased GCase activity was quantified in both the 4L/PS-NA and 4L control mice, with significant GCase deficits as compared to wild-type mice (Table 13). GCase activity was also not significantly different between the 4L/PS-NA and 4L control mice at 12 and 18 weeks of age (Table 13).

[0979] Also, at five-weeks, 12 weeks, and 18 weeks of age, GBA1 substrate levels, specifically glucosylsphingosine (GlcSph) and glucosylceramide (GlcCer), were measured by LC-MS/MS in forebrain, midbrain and hindbrain tissue sections of 4L/PS-NA (model having decreased GCase and prosaposin), 4L control (model having decreased GCase) and wild-type (normal GCase and prosaposin) mice and normalized to actin. As shown in Table 14, the greatest increase in GlcSph levels was observed in the brains of the 4L/PS-NA mice followed by 4L-control mouse brains, relative to the wild-type mouse. Additionally, GlcSph levels in the 4L/PS-NA mouse brains and 4L control mouse brains increased with age and higher levels were observed in the hindbrain, as compared to the forebrain or midbrain. These data demonstrate the effects of reduced GCase activity and decreased GBA1 levels in these mice, as measured above.

TABLE 14
Avg. glucosylsphingosine level (GlcSph/Actin) in GBA1-related disease mouse models

| | 5 Weeks | | | 12 Weeks | | | 18 Weeks | | |
|---|---|---|---|---|---|---|---|---|---|
| | Region of Brain | | | Region of Brain | | | Region of Brain | | |
| Animal | Fore- | Mid- | Hind- | Fore- | Mid- | Hind- | Fore- | Mid- | Hind- |
| Model | brain | brain | brain | brain | brain | brain | brain | brain | brain |
| 4L/PS- | 1086.1 | 1050.9 | 1384.0 | 1792.6 | 1897.0 | 2543.6 | 2571.0 | 3113.1 | 5672.8 |
| NA | | | | | | | | | |
| 4L | 268.0 | 317.0 | 308.7 | 404.5 | 435.2 | 520.1 | 465.8 | 453.4 | 455.1 |
| Control | | | | | | | | | |
| Wild- | 0 | 0 | 0 | 0 | 0 | 0 | 0 | 0 | 0 |
| type | | | | | | | | | |

[0980] As shown in Table 15, the levels of GlcCer was increased in the 4L/PS-NA mouse brains, and the levels were higher in the hindbrain as compared to the forebrain and the midbrain. Levels of GlcCer were also higher at 18 weeks of age in the 4L/PS-NA mouse brains. These data also support the effects of reduced GCase activity and decreased GBA1 levels in these mice, as measured above.

TABLE 15
Avg. glucosylceramide (GlcCer) 18:1/18:0/Actin in GBA1-related disease mouse models

| | 5 Weeks | | | 12 Weeks | | | 18 Weeks | | |
|---|---|---|---|---|---|---|---|---|---|
| | Region of Brain | | | Region of Brain | | | Region of Brain | | |
| Animal | Fore- | Mid- | Hind- | Fore- | Mid- | Hind- | Fore- | Mid- | Hind- |
| Model | brain | brain | brain | brain | brain | brain | brain | brain | brain |
| 4L/PS- | 2179.2 | 1875.6 | 2247.5 | 7894.8 | 6425.0 | 12123.0 | 14774.5 | 15368.6 | 25601.5 |
| NA | | | | | | | | | |
| 4L | 695.8 | 528.6 | 454.7 | 703.2 | 547.7 | 488.9 | 738.6 | 627.3 | 545.8 |
| Control | | | | | | | | | |
| Wild- | 510.4 | 361.9 | 332.2 | 375.6 | 359.0 | 355.7 | 517.9 | 439.6 | 374.2 |
| type | | | | | | | | | |

[0981] Taken together, these data support use of the 4L/PS-NA mice as model for neuropathic Gaucher disease, and for assessing efficacy of viral constructs encoding a GBA1 protein e.g., constructs GBA_VG1-GBA_VG34, e.g., as described in Tables 18-21 or 29-32 above.

### Example 11: Exemplary Lead Identification

### A. Generation of Wild-Type and Enhanced GBA1 Viral Genome Variants

[0982] Viral genomes were designed for AAV delivery of a GBA1 protein, e.g., a wild-type GBA1 protein (wtGBA) that does not further comprise an enhancement element; or an enhanced GBA1 protein (enGBA) that further comprises an enhancement element described herein, e.g., a prosaposin protein, a SapC protein, or functional variant thereof; a cell penetrating peptide (e.g., an ApoEII peptide, a TAT peptide, and/or an ApoB peptide) or functional variant thereof; a lysosomal targeting signal (LTS) or functional variant thereof; or a combination thereof (enGBAcombo). The nucleotide sequence from 5′ ITR to 3′ ITR of the viral genome constructs that comprise a transgene encoding an GBA1 protein with or without an enhancement element, are provided as GBA_VG1-GBA_VG33 herein, which are SEQ ID NOs: 1759-1771, 1809-1828, or 1870, respectively. These constructs are also summarized in Tables 5-6.

[0983] Each of these viral genome constructs comprise a nucleic acid comprising a transgene encoding a GBA1 protein. The transgene was designed to comprise a wild type nucleotide sequence encoding GBA1 (SEQ ID NO: 1777), or one of two different codon optimized nucleotide sequence encoding a GBA1 protein, SEQ ID NO: 1773 or 1781. In designing these viral genome constructs for expression of GBA, several promoters were selected and tested (e.g., promoters as described in Table 5), including a CMV promoter (SEQ ID NO: 1833); a CMVie enhancer and a CMV promoter (SEQ ID NO: 1831 and 1832, respectively); a CMVie enhancer and a CBA promoter (SEQ ID NO: 1831 and 1834 respectively); or an EF-1a promoter variant (SEQ ID NOs: 1839 or 1840).

[0984] Some of the viral genome constructs further comprised an intron region, of SEQ ID NO: 1842; a nucleotide sequence encoding a signal sequence (SEQ ID NO: 1850, 1851, or 1852); and/or 4 copies of a miR183 binding site (SEQ ID NO: 1847) separated by a spacer (SEQ ID NO: 1848), or miR183 binding series (SEQ ID NO: 1849). The viral constructs comprised a 5′ ITR of SEQ ID NO: 1829; and a 3′ ITR of SEQ ID NO: 1830. The polyadenylation sequence (SEQ ID NO: 1846) was the same across all viral genome constructs designed.

[0985] Wild-type GBA1 viral genome variants encoding a GBA1 protein were prepared as described and are outlined in Tables 5-6 (e.g., GBA_VG1, GBA_VG17-GBA_VG21, GBA_VG26, and GBA_VG33; SEQ ID NOs: 1759, 1812-1816, 1821, and 1828).

[0986] Enhanced GBA1 viral genome variants encoding a GBA1 protein and an enhancement element were prepared and are outlined in Table 5 (GBA_VG2-GBA_VG16, GBA_VG22-GBA_VG25, GBA_VG27-GBA_VG32; SEQ ID NO: 1760-1771, 1809-1811, 1817-1820, 1822-1827). The enhanced viral genomes were designed to further encode an enhancement element comprising a prosaposin protein (encoded by SEQ ID NO: 1859); saposin C protein or a functional variant (encoded by SEQ ID NO: 1787 or 1791); a cell penetrating peptide, including an ApoEII peptide (encoded by SEQ ID NO: 1797), a TAT protein (encoded by SEQ ID NO: 1793), or an ApoB peptide (encoded by SEQ ID NO: 1795); a lysosomal targeting signal (LTS) (encoded by any of SEQ ID NOs: 1799, 1801, 1803, 1805, or 1807); or a combination thereof. Some of the enhanced viral genome constructs further comprise a nucleotide sequence encoding a signal sequence (e.g., SEQ ID NO: 1856), and/or a linker (e.g., SEQ ID NO: 1724, 1726, or 1730). Some constructs, e.g., those encoding a prosaposin protein or a saposin C protein, encode a cleavable linker such as a furin and/or T2A cleavage site (encoded by SEQ ID NO: 1724 or 1726, respectively). Some constructs, e.g., those encoding a cell penetrating peptide, encode a flexible, glycine-serine linker (encoded by SEQ ID NO: 1730).

[0987] The viral construct GBA_VG1 (SEQ ID NO: 1759), comprising the nucleotide sequence of SEQ ID NO: 1781, with no additional enhancement elements (e.g., a saposin protein, a lysosomal targeting sequence, a cell penetrating sequence, or a combination thereof) was used as a reference or benchmark construct, e.g., in the experiments described herein.

### B. In-Vitro Assessment of Payload Expression

[0988] Prior to vectorization, the wild-type and enhanced GBA1 viral genome variants were first used to validate the tools necessary for conducting lead identification studies, such as, but not limited to assays and cell-systems.

[0989] LC-MS/MS assays were established to quantify GBA1 (ng/mg of total protein) and SapC (ng/mg of total protein) in lysates collected from HEK293 cells transfected with a wild-type or enhanced GBA1 viral genome variant plasmid DNA including, GBA_VG1 (SEQ ID NO: 1759, encoding a GBA1 protein), GBA_VG8 (SEQ ID NO: 1766, encoding a GBA1 protein and a prosaposin protein of SEQ ID NO: 1785), GBA_VG9 (SEQ ID NO: 1767, encoding a GBA1 and a Saposin C protein of SEQ ID NO: 1789) and GBA_VG10 (SEQ ID NO: 1768, encoding a GBA1 protein and a Saponin C protein of SEQ ID NO: 1758). Lysates were also run on Western blot to confirm the presence of expressed GBA.

[0990] These validation experiments demonstrated that transfection of cells with the wild-type or enhanced GBA1 variant construct DNA resulted in increases in measured GBA1 or SapC in the lysate as determined by LC-MS/MS and Western blot when compared to lysate of untransfected cells.

### C. In-Vitro Cell-System Assessment and Validation

[0991] Additional LC-MS/MS assays were used to quantify GCase activity and/or levels of GBA1 substrates (e.g., glycosphingolipids (GlcSph) quantified as ng/mg Actin in the FIG. 1A, or as ng/mg Lamp 1 in FIG. 1B) in Gaucher disease patient derived (GM04394-fibroblast (GD1 patient), GM00852-fibroblast (GD1 patient), GM00877-fibroblast (GD2 patient) or healthy control (GM05758-fibroblast from skin/inguinal area and GM02937-fibroblast from skin/unspecified) fibroblasts. Again, these quantifications were supplemented with Western blot analyses.

[0992] As anticipated, GBA1 substrate levels, specifically glycosphingolipids, as quantified as ng/mg Actin in FIG. 1A, or as ng/mg Lamp 1 in the in FIG. 1B, were increased across all three Gaucher disease patient derived fibroblast samples, as compared to control fibroblast levels, when measured by LC-MS/MS (FIGS. 1A-1B). Meanwhile, GBA1 protein detection (measured as the concentration of GBA1 in the cell lysate relative to total protein (ng/mg total protein) in GD patient fibroblasts was decreased compared to the healthy controls (FIG. 1C).

[0993] Quantification of GCase activity in lysate collected from Gaucher disease patient derived fibroblasts transfected with enhanced GBA1 viral genome variants was measured as Relative Fluorescence units per ng protein (RFU per ng protein) and was shown to be decreased when by 96.5%, 98.4% and 99.2% (GM04394-fibroblast, GM00852-fibroblast, GM00877-fibroblast, respectively) as compared to an average of the normal controls. Data are shown below in Table 16.

TABLE 16
Avg. GCase activity[RFU per ng protein] in
Gaucher disease patient derived fibroblasts

| Fibroblast cell line | GCase activity |
|---|---|
| GM04394 | 465.53 |
| GM00852 | 221.29 |
| GM00877 | 109.44 |
| GM05758 (Control) | 14997.59 |
| GM02937 (Control) | 11750.07 |

[0994] Quantification of GBA1 substrate in lysate collected from Gaucher disease patient derived fibroblasts transfected with enhanced GBA1 viral genome variants was measured as glucosylsphingosine/Lamp1 (ng/mg Lamp1) and was shown to be increased when compared to control. Data are shown below in Table 17.

TABLE 17
Avg. glucosylsphingosine (ng/mg Lamp1) in
Gaucher disease patient derived fibroblasts

| Fibroblast cell line | Glucosylsphingosine |
|---|---|
| GM04394 | 716.33 |
| GM00852 | 710.67 |
| GM00877 | 4348.00 |
| GM05758 (Control) | 146.00 |
| GM02937 (Control) | 134.5 |

D. In-Vitro Packaging into AAV Particles and Capsid Selection

[0995] The wild-type and enhanced GBA1 viral genome variants (GBA_VG1 to GBA_VG13; SEQ ID NO: 1759-SEQ ID NO: 1771) were each packaged into AAV2 or AAV6 capsids.

[0996] In vitro capsid selection studies were conducted wherein cells were transduced with AAV particles comprising an enhanced GBA1 viral genome variant packaged in AAV2 or AAV6 at a series of increasing MOIs (1.00E1, 1.00E2, 1.00E3, 1.00E4, 1.00E5 and 1.00E6) and vector genome per cell quantified. Based on transduction efficiency, AAV2 was selected for further studies.

### E. In-Vitro Dose-Range Finding Studies

[0997] AAV particles comprising reference viral genome GBA_VG1 (SEQ ID NO: 1759) was screened in a dose-range finding study, wherein GCase activity was quantified subsequent to transduction of cells with an increasing series of MOIs (1.00E1, 1.00E2, 1.00E3, 1.00E4, 1.00E5 and 1.00E6). Based on these findings, a mid-range MOI of 1.00E3 was selected for further studies.

### F. AAV2-GBA1 Transduction in Gaucher Disease Patient Fibroblast Cells

[0998] AAV2-GBA1 particles comprising viral genomes GBA_VG1 (SEQ ID NO: 1759), GBA_VG2 (SEQ ID NO: 1760), GBA_VG3 (SEQ ID NO: 1761), GBA_VG4 (SEQ ID NO: 1762), GBA_VG5 (SEQ ID NO: 1763), GBA_VG6 (SEQ ID NO: 1764), GBA_VG7 (SEQ ID NO: 1765) were administered at MOI 1.00E3 to Gaucher disease patient fibroblasts (GM00877-fibroblasts) and GCase activity quantified and normalized to mg protein. The results are shown in Table 18 below.

TABLE 18
GCase activity in Gaucher disease patient fibroblasts

| | | GCase Activity |
|---|---|---|
| Construct ID | SEQ ID NO: | [RFU per mL] |
| GBA_VG1 | 1759 | 9814.48 |
| | | 16616.84 |
| | | 3686.62 |
| | | 3478.15 |
| Avg. | | 8399.02 |
| GBA_VG2 | 1760 | 6375.98 |
| | | 3150.89 |
| | | 7426.56 |
| | | — |
| Avg. | | 5651.14 |
| GBA_VG3 | 1761 | 11580.6 |
| | | 22812.97 |
| | | 14152.31 |
| | | — |
| Avg. | | 16181.96 |
| GBA_VG4 | 1762 | 10963.45 |
| | | 11695.58 |
| | | 7980.39 |
| | | — |
| Avg. | | 10213.14 |
| GBA_VG5 | 1763 | 17076.48 |
| | | 8665.12 |
| | | 16343.61 |
| | | — |
| Avg. | | 14028.40 |
| GBA_VG6 | 1764 | 5117.13 |
| | | 3391.47 |
| | | 4177.62 |
| | | — |
| Avg. | | 4228.74 |
| GBA_VG7 | 1765 | 9842.00 |
| | | 9366.20 |
| | | 13187.36 |
| | | — |
| Avg. | | 10798.52 |

[0999] Western blot analysis further confirmed a ~70 kD mature GBA1 protein in those samples transduced with AAV2-enhanced GBA1 particles. Negligible GBA1 was evident in Gaucher disease patient derived fibroblast samples that had not been transduced with an AAV2-enhanced GBA1 particle.

[1000] Additional AAV2 particles comprising viral genome constructs encoding a GBA1 protein and an enhancement element such as saposin C protein, a lysosomal targeting signal (LTS), a cell penetrating peptide (CPP), or a combination thereof (e.g., as outlined in Table 5 above), were vectorized for screening at an MOI of 103.5 in Gaucher disease (GD) patient-derived fibroblasts (GD-II GM00877). The vectorized viral genome constructs included GBA_VG1 (SEQ ID NO: 1759), GBA_VG9 (SEQ ID NO: 1767), GBA_VG10 (SEQ ID NO: 1768), GBA_VG11 (SEQ ID NO: 1769), GBA_VG6 (SEQ ID NO: 1764), GBA_VG7 (SEQ ID NO: 1765), GBA_VG12 (SEQ ID NO: 1770), GBA_VG3 (SEQ ID NO: 1761), GBA_VG4 (SEQ ID NO: 1762), GBA_VG5 (SEQ ID NO: 1763), and GBA_VG13 (SEQ ID NO: 1771). GCase activity was quantified in the pelleted patient cells (FIG. 2A) and the corresponding conditioned media (FIG. 2B), as relative fluorescence units per mg protein (RFU per mg protein). Treatment with six of the vectorized viral genome constructs (GBA_VG9, GBA_VG6, GBA_VG7, GBA_VG3, GBA_VG4, and GBA_VG5) resulted in an increase in GCase activity measured in the pelleted GD patient fibroblasts (FIG. 2A) and the corresponding conditioned media (FIG. 2B).

[1001] An LC-MS/MS assay was then used to quantify levels of the GBA1 substrate glucosylsphingosine (GlcSph, ng/mg Lamp1) in the cell lysis from GD II patient-derived fibroblasts transduced with the viral genomes constructs GBA_VG1 (SEQ ID NO: 1759), GBA_VG9 (SEQ ID NO: 1767), GBA_VG6 (SEQ ID NO: 1764), GBA_VG7 (SEQ ID NO: 1765), GBA_VG3 (SEQ ID NO: 1761), GBA_VG4 (SEQ ID NO: 1762), and GBA_VG5 (SEQ ID NO: 1763) vectorized in AAV2 particle. As shown in FIG. 3, the buildup of GBA1 substrate levels was reduced significantly in GD patient-derived fibroblasts transduced with the AAV2 GBA1 vectors, compared to the no AAV control. The data demonstrated that the AAV-mediated gene therapy can be effective in increasing GCase activity to treat diseases associated with GBA1 deficiency.

### Example 12: AAV2 Enhanced GBA1 Vectors Containing Combinations of Enhancement Elements

[1002] Additional viral genome constructs were generated encoding a GBA1 protein, wherein the GBA1 protein is encoded by the wild-type nucleotide sequence of SEQ ID NO: 1777, or the codon optimized nucleotide sequence of SEQ ID NO: 1773, and further encoding an enhancement element such as a cell penetration peptide (CPP) (e.g., ApoEII), a lysosomal targeting sequence (e.g., LTS2), a SapC protein, or combination thereof. These constructs also comprised different promoters, including a CBA, a CMV, or a CAG promoter. These exemplary GBA1 viral genome constructs are included in Table 5-6.

[1003] GD-II patient fibroblasts (GM00877) were transduced with an AAV2 vector comprising the viral genome constructs: GBA_VG1 (SEQ ID NO: 1759), GBA_VG14 (SEQ ID NO: 1809), GBA_VG15 (SEQ ID NO: 1810), GBA_VG16 (SEQ ID NO: 1811), GBA_VG17 (SEQ ID NO: 1812), GBA_VG18 (SEQ ID NO: 1813), GBA_VG19 (SEQ ID NO: 1814), and GBA_VG20 (SEQ ID NO: 1815), at an MOI of 102.5 (first bar), 103 (second bar), 103.5 and 104. The GCase activity was quantified on day 7 post-transduction after lysing the treated patient cells (FIG. 4A), as relative fluorescence units per mg protein (RFU per mg protein As shown in FIG. 4A, all viral genome constructs tested resulted in a dose-responsive increase in GCase activity in GD II patient-derived fibroblasts. The GBA_VG20 construct comprising the CAG promoter operably linked to a codon-optimized nucleotide sequence of SEQ ID NO: 1773 encoding a GBA1 protein vectorized in AAV2 vector showed significantly higher GCase activity compared to the GBA_VG1 construct comprising a CMVie enhancer and CBA promoter operably linked to the nucleotide sequence of SEQ ID NO: 1781 encoding the GBA1 protein at the MOI of 104.

[1004] An LC-MS/MS assay was then used to quantify levels of the GBA1 substrate glucosylsphingosine (GlcSph, ng/mg Lamp1) in the cell lysis from GD II patient-derived fibroblasts transduced with the viral genomes constructs GBA_VG1 (SEQ ID NO: 1759), GBA_VG14 (SEQ ID NO: 1809), GBA_VG15 (SEQ ID NO: 1810), GBA_VG16 (SEQ ID NO: 1811), GBA_VG17 (SEQ ID NO: 1812), GBA_VG18 (SEQ ID NO: 1813), GBA_VG19 (SEQ ID NO: 1814), and GBA_VG20 (SEQ ID NO: 1815) vectorized in an AAV2 vector. As shown in FIG. 4B, all viral genome constructs tested reduced GBA1 substrate buildup indicating successful target engagement within GD patient cells.

### Example 13: Bioinformatics Analysis of Wild-Type and Codon-Optimized Sequences Encoding a GBA1 Protein

[1005] Bioinformatics analysis on the sequence level was performed to differentiate between viral genome constructs encoding a GBA1 protein, wherein the GBA1 protein is encoded by a wild-type nucleotide sequence of SEQ ID NO: 1777 (e.g., the nucleotide sequence encoding the GBA1 protein of GBA_VG21, as shown in Table 5), a first codon-optimized nucleotide sequence of SEQ ID NO: 1773 (e.g., the nucleotide sequence encoding the GBA1 protein of GBA_VG17, as shown in Table 5-6), or a second codon-optimized of SEQ ID NO: 1781 (the nucleotide sequence encoding the GBA1 protein of GBA_VG1, as shown in Table 5). Briefly, sequence-level differentiation criteria, such as GC content, RNA accessibility, miRNA binding, transcriptional motifs and splicing events, were assessed using mRNA-based sequence analysis tools (RegRNA 2.0 by Chang et al., 2013, BMC Bioinformatics, 14, Suppl 2: S4; miRDB by Chen & Wang, 2020, Nucleic Acids Res, 48 (D1): D127-D131; the contents of each herein incorporated by reference in its entirety).

[1006] Based on the above analysis using miRDB (Chen & Wang, 2020, supra) with respect to miRNA binding, a series of putative recognition sites were found in the construct with first codon-optimized nucleotide sequence encoding a GBA1 protein of SEQ ID NO: 1773 (GBA_VG17). Specifically, this codon-optimized sequence of SEQ ID NO: 1773 had 42 total miRNA binding sites including 4 high confidence hits. Among those, 21 sites were distinct from the second codon optimized sequence of SEQ ID NO: 1781 of GBA_VG1, and 11 sites were new and not present in the wild type nucleotide sequence of SEQ ID NO: 1777 of GBA_VG21. This is summarized in Table 19. A second miRNA analysis tool (RegRNA 2.0 by Chang et al., 2013 supra), as shown in Table 20, further confirmed that miRNA binding sites tended to be unique to each sequence codon optimized sequence analyzed.

TABLE 19
miRDB Summary of miRNA Binding

| | WT (SEQ ID | WT (SEQ ID | | |
|---|---|---|---|---|
| | NO: 1777) vs | NO: 1777) vs | SEQ ID NO: | “High |
| | SEQ ID NO: | SEQ ID NO: | 1773 vs SEQ ID | Confidence” |
| | 1781 | 1773 | NO: 1781 | miRNA |
| SEQ ID NO: 1773 | N/A | 30 | 21 | 4 |
| (GBA_VG17) Unique | | | | |
| Wild Type (SEQ ID NO: | 42 | 41 | N/A | 1 |
| 1777) (GBA_VG21) Unique | | | | |
| SEQ ID NO: 1781 | 27 | N/A | 17 | 2 |
| (GBA_VG1) Unique | | | | |
| Similar | 11 | 12 | 21 | 0 |

TABLE 20
RegRNA 2.0 Summary of miRNA Binding

| | WT (SEQ ID | WT (SEQ ID | SEQ ID |
|---|---|---|---|
| | NO: 1777) vs | NO: 1777) vs | NO: 1773 vs |
| | SEQ ID NO: | SEQ ID NO: | SEQ ID NO: |
| | 1781 | 1773 | 1781 |
| SEQ ID NO: 1781 | 3 | N/A | 3 |
| (GBA_VG1) | | | |
| Unique | | | |
| SEQ ID NO: 1773 | N/A | 2 | 3 |
| (GBA_VG17) | | | |
| Unique | | | |
| WT (SEQ ID NO: | 6 | 6 | N/A |
| 1777) (GBA_{—} | | | |
| VG21) Unique | | | |
| Similar | 0 | 1 | 0 |

[1007] With respect to the analysis of the transcriptional motifs, the first codon-optimized sequence of SEQ ID NO: 1773 in GBA_VG17 had 70 total sites; 32 sites were distinct from the second codon optimized sequence of SEQ ID NO: 1781 in GBA_VG1, and 54 sites were new and not present in the wild type sequence of SEQ ID NO: 1777 in GBA_VG21 (Table 21).

TABLE 21
RegRNA 2.0 summary of regulatory motifs

| | WT (SEQ ID | WT (SEQ ID | SEQ ID |
|---|---|---|---|
| | NO: 1777) vs | NO: 1777) vs | NO: 1773 vs |
| | SEQ ID NO: | SEQ ID NO: | SEQ ID NO: |
| | 1781 | 1773 | 1781 |
| SEQ ID NO: 1781 | 49 | N/A | 24 |
| (GBA_VG1) Unique | | | |
| SEQ ID NO: 1773 | N/A | 54 | 32 |
| (GBA_VG17) Unique | | | |
| Wild Type (SEQ ID | 39 | 34 | N/A |
| NO: 1777) (GBA_{—} | | | |
| VG21) Unique | | | |
| Similar | 11 | 16 | 38 |

[1008] With respect to the splicing events analysis, the first codon-optimized sequence of SEQ ID NO: 1773 in GBA_VG17 had 5 total sites; 3 sites were distinct form the second codon-optimized sequence of SEQ ID NO: 1781 GBA1 sequence in GBA_VG1, and all 3 of these were completely new and not present in the wild-type sequence of SEQ ID NO: 1777 in GBA_VG21 (Table 22).

TABLE 22
Summary of RegRNA 2.0 Splice Events

| | WT (SEQ ID | WT (SEQ ID | SEQ ID |
|---|---|---|---|
| | NO: 1777) vs | NO: 1777) vs | NO: 1773 vs |
| | SEQ ID NO: | SEQ ID NO: | SEQ ID NO: |
| | 1781 | 1773 | 1781 |
| Wild Type (SEQ ID | 6 | 6 | N/A |
| NO: 1777) (GBA_{—} | | | |
| VG21) Unique | | | |
| SEQ ID NO: 1773 | N/A | 5 | 3 |
| (GBA_VG17) Unique | | | |
| SEQ ID NO: 1781 | 3 | N/A | 2 |
| (GBA_VG1) Unique | | | |
| Similar | 1 | 0 | 2 |

[1009] The GC content of the first codon optimized sequence (SEQ ID NO: 1773) was compared to the second codon optimized sequence (SEQ ID NO: 1781) and the wild-type sequence (SEQ ID NO: 1777). For RNA accessibility and GC content, the wild type GC biodistribution pattern was maintained in the first codon optimized sequence of SEQ ID NO: 1773 of GBA_VG17 (FIG. 5). However, the second codon optimized sequence of SEQ ID NO: 1781 (GBA_VG1) had balanced GC content across the entire length of the nucleotide sequence (FIG. 5).

[1010] The percentage homology for SEQ ID NO: 1781 (GBA_VG1) and SEQ ID NO: 1773 (GBA_VG17) with respect to the wild type sequence (SEQ ID NO: 1777; GBA_VG21) is shown in Table 23. The first codon-optimized sequence of SEQ ID NO: 1773 in GBA_VG17 shares about 80.6% and about 80.0% sequence homology with respect to the wild type sequence of SEQ ID NO: 1777 in GBA_VG21, without and with the signal sequence, respectively. The second codon-optimized sequence (SEQ ID NO: 1781) in GBA_VG1 shares about 81.3% and about 80.7% sequence homology with respect to the wild type GBA1 sequence, without and with signal sequence, respectively. The first codon-optimized sequence of SEQ ID NO: 1773 in GBA_VG17 has about 87.0% and about 86.3% sequence homology with respect to the second codon optimized nucleotide sequence of SEQ ID NO: 1781, in GBA_VG1 without and with signal sequence, respectively. There were 131 unique mutations introduced into the first codon-optimized nucleotide sequence of SEQ ID NO: 1773 (GBA_VG17) relative to the wild type nucleotide sequence of SEQ ID NO: 1777 (GBA_VG21). The second codon-optimized nucleotide sequence of SEQ ID NO: 1781 (GBA_VG1) had 120 unique mutations relative to the wild type nucleotide sequence of SEQ ID NO: 1777 (GBA_VG21).

TABLE 23
GC Content and Percentage Homology of Codon
Optimized Sequences (SEQ ID NO: 1773 or 1781) Relative
to the Wild Type Sequence (SEQ ID NO: 1777)
% Homology to WT GBA

| | | | | | G/C |
|---|---|---|---|---|---|
| | Without | With | Splice | | content |
| cDNA | signal | Signal | site | Unique | (WT |
| Source | sequence | sequence | only | Mutations | 55%) |
| SEQ ID NO: | 80.6% | 80.0% | 4 bp | 131 | 59% |
| 1773 | | | mutation | | |
| (GBA_VG17) | | | | | |
| SEQ ID NO: | 81.3% | 80.7% | 5 bp | 120 | 58.5% |
| 1781 | | | mutation | | |
| (GBA_VG1) | | | | | |
| % SEQ ID | 87.0% | 86.3% | 3 bp | 190 | |
| NO: 1773 to | | | difference | (similar) | |
| SEQ ID NO: | | | | | |
| 1781 | | | | | |
| (GBA_VG17/ | | | | | |
| GBA_VG1) | | | | | |

### Example 14: Functional Comparison of Wild-Type and Codon-Optimized Sequences Encoding a GBA1 Protein

[1011] GBA1 expression and GCase activity of a GBA1 protein was compared for the vectorized viral genome constructs GBA_VG17 (SEQ ID NO: 1812) comprising a first codon optimized sequence (SEQ ID NO: 1773) encoding the GBA1 protein, GBA_VG1 (SEQ ID NO: 1759) comprising a second codon optimized sequence (SEQ ID NO: 1781) encoding the GBA1 protein, and GBA_VG21 (SEQ ID NO: 1816) comprising a wild-type GBA1 sequence (SEQ ID NO: 1777) encoding a GBA1 protein.

[1012] GD-II patient fibroblasts (GD-II GM00877) were treated at 104.5 MOI of AAV2 vectors comprising the following constructs: GBA_VG17 (AAV2.GBA_VG17), GBA_VG1 (AAV2.GBA_VG1), or GBA_VG21 (AAV2.GBA_VG21), and GCase activity was quantified as RFU per mL and normalized to mg of total protein. As shown in FIG. 6A, AAV2.GBA_VG17 resulted in superior enzymatic GCase activity compared to AAV2.GBA_VG1 and AAV2.GBA_VG21 treated cells. GCase activity was 52.4 fold higher in AAV2.GBA_VG17 treated GD patient cells compared to a no AAV control; but only 30.8 fold and 32.9 fold higher in AAV2.GBA_VG21 and AAV2.GB_VG1 treated GD patient cells, respectively, compared to a no AAV control.

[1013] GD-II patient fibroblasts (GD-II GM00877) were then treated at an MOI of 106 of AAV2 vectors comprising the following constructs: GBA_VG17 (AAV2.GBA_VG17), GBA_VG1 (AAV2.GBA_VG1), or GBA_VG21 (AAV2.GBA_VG21), and glucosylsphingosine levels (GlcSph in cell lysate (ng/mg Lamp1) and GBA1 substrate reduction activity was measured by LC-MS/MS. As shown in FIG. 6B, all constructs tested resulted in similar glucosylsphingosine levels and GBA1 substrate reduction, which were significantly reduced compared to the no AAV control. Expression of the encoded GBA1 protein by these GD patient cells treated with AAV2.GBA_VG17, AAV2.GBA_VG1, and AAV2.GBA_17 vectors was confirmed by Western blot.

[1014] Taken together, these data demonstrate higher GCase activity, stable GBA1 protein expression, and significant reduction of glucosylsphingosine levels with AAV2 vectorized GB_VG17 (SEQ ID NO: 1812), comprising the codon-optimized nucleotide sequence of SEQ ID NO: 1773 encoding the GBA1 protein compared to AAV2 vectorized GBA_VG1 and GBA_VG21.

### Example 15. Route of Administration and Production Platform Comparison Study

[1015] In this Example, HEK and Sf9-produced AAV9 vectors, for biodistribution and GBA1 expression in wild type rat brain were assessed. The vectors were administered to the animals either by a single route of administration by intra-cisterna magna (ICM) or intrathalamic (ITH) delivery, or a dual route of administration, comprising a combination of ICM and ITH delivery.

[1016] AAV9 vectors packaged with GBA_VG1 (SEQ ID NO: 1759) (AAV9.GBA_VG1) produced in HEK and SF9 cells were injected into wild-type rat. For bilateral ITH administration, 7.5×10⁹ AAV9.GBA_VG1 viral genomes were injected into the thalamus of each hemisphere, resulting in a total dose of 1.5 109 vector genomes. For ICM injection, 1.5×10¹⁰ AAV9.GBA_VG1 viral genomes were injected. For dual ITH and ICM administration, 1.5×10¹⁰ AAV9.GBA_VG1 viral genomes were injected for ICM delivery, and 7.5×10⁹ AAV9.GBA_VG1 viral genomes were injected into the thalamus of each hemisphere for bilateral ITH delivery, for a total dose of 3×10¹⁰ AAV9.GBA_VG1 viral genomes. Four weeks post-injection, the brains of the rats were assayed for bio-distribution of the viral genome and GCase activity in the central nervous system and peripheral tissues.

[1017] First, all animals throughout all treatment groups continued to gain weight consistently post operatively until time of euthanasia (4 week in life). Daily clinical observations showed normal healthy subjects. Therefore, at both selected doses of 1.5×10¹⁰ for single route of administration, and 3×10¹⁰ for combination route of administration, all animals tolerated the AAV treatments.

[1018] Viral genome distribution was also assessed at 28 days post intrathalamic dosing of HEK and Sf9 produced AAV9-GBA1 vectors in the wild-type rat brain, particularly in the thalamus, hippocampus striatum, and cortex. In the thalamus, hippocampus and striatum, there was a trend of higher average biodistribution with HEK-produced AAV9 vector compared to Sf9 (~3-6 fold VG/cell increase). In the cortex, a similar average biodistribution profile was observed for HEK and Sf9 produced AAV9 vectors. These data show increased biodistribution with AAV9-GBA1 vectors produced by an HEK platform as compared to Sf9 following intrathalamic dosing in rats.

[1019] GCase activity was also compared at 28 days post intrathalamic dosing of HEK and Sf9 produced AAV9-GBA1 vectors in the wild-type rat brain. GCase activity was generally increased over baseline. However, the average increase in GCase activity was the greatest in the thalamus (site of injection) (70% over endogenous for Sf9 produced vectors and 20% over endogenous for HEK vectors, and in the thalamus, a moderate increase in average GCase activity was observed for HEK produced vectors relative to Sf9 produced vectors. Low to moderate increase was observed in forebrain and midbrain regions (cortex, striatum and hippocampus, ~5-40% over endogenous).

[1020] Taken together, these data demonstrate that bilateral ITH AAV9.GBA_VG1 dosing resulted in successful distribution of AAV VGs in the CNS tissues and detectable overexpression of GBA1 (increased GCase activity over endogenous GCase activity) within a wild-type rat brain.

[1021] The effects of routes of administration on viral genome distribution and GCase activity of HEK produced AAV9.GBA_VG1 vectors were evaluated at day 28 post ICM, ITH, or dual ICM and ICM delivery of the vectors. A significantly higher viral genome distribution in ITH group was observed in deep-brain structures, including the thalamus and hippocampus, compared to ICM or dual ITH and ICM dosing. Similarly, higher viral genome distribution was observed in ITH group compared to ICM and dual ITH and ICM dosing. For cortex tissue, dual ITH and ICM dosing resulted in a significantly higher viral genome biodistribution compared to ITH and ICM dosing. Taken together, ITH delivery of AAV9-GBA1 vector displayed a higher viral genome (VG) biodistribution profile in the deep-midbrain structures (especially in the hippocampus and thalamus) as compared to ICM and dual ITH+ICM delivery. Further, ITH delivery appeared to drive the VG biodistribution profile in fore/mid brain observed with dual ITH+ICM injection.

[1022] For hindbrain tissues, a significantly higher cerebellar viral genome distribution was observed in ITH group compared to ICM or dual ITH and ICM dosing. Similarly, a trend of higher viral genome biodistribution was observed in brainstem for ITH group compared to ICM and dual ITH and ICM dosing. Therefore, similar to forebrain and midbrain structures, ITH delivery of AAV9-GBA_VG1 vector produced by HEK cells displayed a higher viral genome biodistribution profile in the hindbrain structure as compared to ICM and dual ITH and ICM delivery.

[1023] For forebrain and midbrain tissues with respect to GCase activity, the highest increase was observed at site of injection in thalamus (about 250% post ITH deliver followed by about 207% in dual ITH and ICM dosing). Moderate increase was observed post ITH delivery in cortex (about 123% compared to vehicle control, and about 141% after dual ITH and ICM dosing). For ICM dosing, minimal or no increase in GCase activity was observed in thalamus (about 110%) and cortex (about 91%) post ICM delivery. Combinatorial dosing (ICM and ITH) showed the highest GCase activity in cortex (about 141%). Overall, based on the viral genome distribution results and the GCase results, ITH dosing appears to be driving the increase in GCase activity in thalamus and cortex. Additionally, the AAV genome per cell biodistribution shows similar trend of GCase activity in the thalamus and cortex.

[1024] For hindbrain tissues, the highest increase was observed post ITH injection in cerebellum (about 178%), and a low increase was seen post both ICM and dual ICM and ITH delivery in cerebellum. Combinatorial dosing group did not show a higher increase in GCase activity readout within cerebellum. Overall, based on the viral genome distribution results and the GCase results, ITH dosing appears to be driving the increase in GCase activity in the cerebellum and the AAV genome per cell biodistribution shows similar trend of GCase activity in the cerebellum.

[1025] GCase activity was also evaluated in CSF fluid. Different levels of increase in CSF GCase activity were observed with different routes of administration. Specifically, the highest increase in GCase activity was observed in combinatorial dosing (ITH and ICM), followed by ITH delivery, and only moderate increase was observed by ICM delivery. These data demonstrated that AAV delivered GBA1 gene transfer in rats resulted in secretion of active GCase product in CSF.

[1026] This experiment demonstrated that intrathalamic injection and dual mode injection resulted in a more efficient delivery of AAV-GBA1 viral particles and a higher GCase expression/activity in the CNS tissues and the CSF.

### Example 16: In Vivo Evaluation of a Vectorized Viral Genome Comprising a Codon Optimized Nucleotide Sequence Encoding GBA1

[1027] This Example investigates the distribution and efficacy of the viral genome construct GB_VG17 (SEQ ID NO: 1812) comprising a codon-optimized nucleotide sequence (SEQ ID NO: 1773) encoding a GBA1 protein, vectorized in a VOY101 capsid (VOY101.GBA_VG17) in wild-type C57BL/6 mice. VOY101 is a capsid protein that enables blood brain barrier penetration after IV injection.

[1028] Mice were intravenously injected with 2e13 VG/kg of VOY101.GBA_VG17 or a vehicle control, into the lateral tail vein. At 28-days post IV injection, various CNS tissues (e.g., cortex, striatum, hippocampus, thalamus, cerebellum, brainstem, and/or spinal cord) and peripheral tissues (e.g., heart, liver, and/or spleen) were harvested to measure viral genome (VG) biodistribution (VG/cell), GCase activity, and GBA1 mRNA expression (transgene specific and endogenous). All animals treated remained healthy and there was no significant difference in the body weight between mice treated with VOY101.GBA_VG17 and mice treated with the vehicle control.

[1029] With respect to VG biodistribution, high levels (approximately >50 vg/cell) of VOY101.GBA_VG17 distribution was observed across the forebrain and midbrain. In the cortex, 81.31 VG/cell were quantified on average (range: ~75-85 vg/cell); in the striatum, 150.39 VG/cell were quantified on average (range: ~90-330 vg/cell); in the hippocampus, 152.91 VG/cell were quantified on average (range: ~70-195 vg/cell); and in the thalamus, 117.94 VG/cell were quantified on average (range: ~70-190 vg/cell). Therefore, successful VOY101.GBA_VG17 gene transfer was achieved across the forebrain and midbrain regions.

[1030] Similarly, high levels (approximately >50 vg/cell) of VOY101.GBA_VG17 distribution was observed across the hind brain and spinal cord (cervical region). In the cerebellum, 65.77 VG/cell were quantified on average (range: ~23-105 vg/cell); in the brainstem, 159.22 VG/cell were quantified on average (range: ~110-305 vg/cell); and in the spinal cord, 176.29 VG/cell were quantified on average (range: ~95-280 vg/cell). Therefore, successful VOY101.GBA_VG17 gene transfer was also achieved across the hindbrain and spinal cord.

[1031] With respect to VG biodistribution in peripheral tissues, detectable levels of VOY101.GBA_VG17 were observed in the heart, spleen, and liver, but this was approximately 4-10 fold lower than the levels observed in the CNS tissues. In the heart, 11.58 VG/cell were quantified on average (range: ~5-21 vg/cell); in the spleen, 29.99 VG/cell were quantified on average (range: ~7-82 vg/cell); and in the liver, 18.76 VG/cell were quantified on average (range: ~5-60 vg/cell).

[1032] With respect to GCase activity (measured as RFU/mL normalized to mg of protein), the forebrain and midbrain following IV injection of VOY101.GBA_VG17 demonstrated a significant increase in GCase activity over baseline (vehicle control). The highest increase was observed in the cortex (4.86 fold higher than the vehicle control). A similar increase was observed in the striatum (4.6 fold higher than the vehicle control) and the thalamus (4.74 fold higher than the vehicle control). Therefore, a significant increase in GCase activity was observed in the forebrain and midbrain which had high VOY101.GBA_VG17 biodistribution. Similarly, the hindbrain structures following IV injection of VOY101.GBA_VG17 demonstrated a significant increase in GCase activity over baseline (vehicle control). The cerebellum showed a 4.04 fold higher GCase activity than the vehicle control and the brainstem showed a 5.26 fold higher GCase activity than the vehicle control. Therefore, a significant increase in GCase activity was also observed in the hind brain which had high VOY101.GBA_VG17 biodistribution. Overall, all brain regions tested showed a 4-5 fold increase in GCase activity relative to the vehicle control and IV delivery of VOY101.GBA_VG17 resulted in a successful and uniform increase in GCase activity across pertinent CNS tissues.

[1033] GCase activity was also measured in the liver (as RFU/mL normalized to mg of protein) following IV injection of VOY101.GBA_VG17. The liver showed a 4.12 fold increase in GCase activity relative to the vehicle control, demonstrating a successful increase in GBA1 activity in a non-CNS tissue.

[1034] In additional to the cellular and tissue GCase activity levels quantified in both the CNS and the liver, GCase activity was also measured in the fluid of the mice, including in the cerebral spinal fluid (CSF) and the serum, post-IV injection of VOY101.GBA_VG17. GCase activity was higher in the serum as compared to the CSF. A 5.9 fold increase in GCase activity relative to the vehicle treated control was observed in the CSF and a 22.3 fold increase in GCase activity relative to the vehicle treated control was observed in the serum. These data demonstrate active GCase is secreted into extracellular compartments following IV injection of VOY101.GBA_VG17.

[1035] The GCase activity levels quantified and the fold increase in activity relative to the vehicle in the CNS and peripheral tissues and fluid measured following IV injection of VOY101.GBA_VG17 are summarized in Table 24.

TABLE 24
Summary of GCase activity levels (RFU/per
mL) normalized to mg of protein

| GCase Activity (RFU/per mL) | Fold Increase in GCase activity |
|---|---|
| normalized to mg of protein | relative to no vehicle control |

| | | |
|---|---|---|
| Cortex | Vehicle | 4.86 |
| 62246 | 12789 | |
| Striatum | Vehicle | 4.64 |
| 32063 | 6898 | |
| Thalamus | Vehicle | 4.74 |
| 40506 | 9061 | |
| Cerebellum | Vehicle | 4.04 |
| 36082 | 8926 | |
| Brainstem | Vehicle | 5.26 |
| 44706 | 8495 | |
| Liver | Vehicle | 4.1 |
| 100123 | 24272 | |
| CSF | Vehicle | 5.9 |
| 3707 | 627 | |
| Serum | Vehicle | 22.3 |
| 6919 | 310 | |

[1036] Both endogenous and transgene specific GBA1 mRNA (payload) expression was quantified post-IV injection of VOY101.GBA_VG17 in the cortex, thalamus, and brainstem. GBA1 mRNA was quantified as GBA1 mRNA expression per 1,000 transcripts normalized to geomean (GAPDH, HPRT1, PPIA). With respect to endogenous GBA1 mRNA, approximately 38-63 copies per 1000 transcripts were measured across the brain. More specifically, in the cortex, thalamus, and brainstem, 63.10 endogenous GBA1 mRNA/1,000 transcripts, 38.81 endogenous GBA1 mRNA/1,000 transcripts, and 38.95 endogenous GBA1 mRNA/1,000 transcripts were quantified, respectively. With respect transgene specific GBA1 mRNA, approximately 1314-1765 copies per 1000 transcripts were measured across the brain. In the cortex, thalamus, and brainstem, 1314.39 transgene specific GBA1 mRNA/1,000 transcripts, 1547.21 transgene specific GBA1 mRNA/1,000 transcripts, and 1764.02 transgene specific GBA1 mRNA/1,000 transcripts were quantified, respectively. Accordingly, in the cortex, thalamus, and brain stem, there was an 874 fold, 1032 fold, and 1244 fold increase in transcript specific GBA1 mRNA compared to the vehicle control, respectively. Therefore, successful transcription of the transgene comprising the codon-optimized nucleotide sequence (SEQ ID NO: 1773) encoding the GBA1 protein was achieved in the brain at 28-days post IV injection of a blood brain barrier penetrant VOY101.GBA_VG17 vector. Endogenous GBA1 mRNA levels in the brain maintained similar levels in the tissues treated with VOY101. GBA_VG17 and the tissues treated with the vehicle control. These data demonstrate successful transgene transcription and expression of a GBA1 payload in the CNS following IV injection of VOY101.GBA_VG17.

[1037] Both endogenous and transgene specific GBA1 mRNA expression was also quantified post-IV injection of VOY101.GBA_VG17 in the liver. In the liver, 182.29 endogenous GBA1 mRNA/1,000 transcripts were quantified (range: ~188-240 per 1000 transcripts), and there was no significant difference in the endogenous GBA1 mRNA levels between treated and untreated mice. Approximately, 1372.45 transgene specific GBA1 mRNA/1,000 transcripts were quantified in the liver, and a 739 fold increase in GBA1 mRNA was observed in the treated mice compared to the vehicle control. These data demonstrate successful transgene transcription and expression of a GBA1 payload in the liver following IV injection of VOY101.GBA_VG17.

[1038] The relationship between biodistribution (VG/cell) and GCase activity (RFU/mL, fold over endogenous GCase activity, normalized to mg of protein) following IV injection of VOY101.GBA_VG17 was also evaluated in the cortex, striatum, thalamus, brainstem, cerebellum, and liver of the mice. In the CNS tissues, approximately a 300-660% fold increase in GCase activity over endogenous GCase activity was observed (FIG. 8) and 595-1825 transgene-specific GBA1 mRNA copies/1000 transcripts were quantified. In the liver, while there was intra-group variability, a 180-850% fold increase in GCase activity relative to endogenous GCase activity was measured, with approximately 330-2450 transgene specific GBA1 mRNA copies per 1000 transcripts quantified. The GCase levels quantified in the liver were comparable to the CNS tissues at lower VG/cell levels (FIG. 8). It is predicted that a 30-50% fold increase in GCase activity over endogenous is clinically impactful. Therefore, intravenous injection of VOY101.GBA_VG17 was able to increase the levels of GCase activity in various CNS and peripheral tissues relative to endogenous, well above the predicted fold increase thought to be clinically impactful.

[1039] Some of these data discussed above are summarized in Table 25 below. In summary, VOY101.GBA_VG17 which comprises the codon-optimized nucleotide sequence of SEQ ID NO: 1773 encoding the GBA1 protein demonstrated high biodistribution in the CNS, increased GCase activity in the CNS and peripheral tissues and fluid, and successful transgene transcription and expression. GBA_VG17 could therefore be used in the treatment of disorders associated with a lack of a GBA1 protein and/or GCase activity, such as neuronopathic (affects the CNS) and non-neuronopathic (affects non-CNS) Gaucher's disease, PD associated with a mutation in the GBA1 gene, and dementia with Lewy Bodies.

TABLE 25
Summary of VG biodistribution, GCase activity, and GBA1
mRNA data 28 day post IV injection of VOY101.GBA_VG17
at 2e13 vg/kg in the cortex, thalamus, brain stem and liver

| | | GBA1 mRNA | | GCase |
|---|---|---|---|---|
| | | (over | GBA1 mRNA | expression |
| | VG/ | endogenous | (over vehicle | (over vehicle |
| Region | Cell | GBA) | baseline) | baseline) |
| Cortex | 83.31 | 20.83 | 874 | 4.86 |
| Thalamus | 117.94 | 39.87 | 1032 | 4.74 |
| Brain Stem | 159.22 | 45.29 | 1244 | 5.26 |
| Liver | 18.76 | 7.29 | 739 | 4.12 |

### Example 17. De-targeting GBA1 Expression in the Dorsal Root Ganglia (DRG)

[1040] This Example demonstrates the use of a miR183 binding site to reduce GBA1 expression in the dorsal root ganglion (DRG) neurons, which express the corresponding endogenous microRNA, miR183.

[1041] A viral genome construct, GBA_VG33 (SEQ ID NO: 1828, described in Tables 18-19 and 21), comprising a codon-optimized nucleotide sequence (SEQ ID NO: 1773) encoding a GBA1 protein and a miR183 binding site series (SEQ ID NO: 1849), comprising four miR183 binding sites (each comprising SEQ ID NO: 1847), each separated by an 8 nucleotide spacer (SEQ ID NO: 1848). The GBA_VG33 were also vectorized into an AAV2 vector (AAV2.GBA_VG33).

[1042] HEK293 cells were transfected with the GBA_VG33 construct and GBA1 protein expression was compared to cells transfected with the GB_VG17 control construct (SEQ ID NO: 1812) which comprises a codon-optimized nucleotide sequence (SEQ ID NO: 1773) encoding a GBA1 protein but does not comprise a miR183 binding site series. Similar GBA1 protein expression levels were observed following transfection with the GBA_VG33 construct and the GBA_VG17 control construct. HEK293 cells were also co-transfected with either the GBA_VG33 construct comprising the miR183 binding site series, or the GBA_VG17 control construct, and miR183, and GBA1 protein expression was measured. A significant reduction of GBA1 expression was observed in HEK293 cells co-transfected the GBA_VG33 construct and miR183 compared to those cells co-transfected with the GBA_VG17 control and miR183. These data demonstrated that the GBA_VG33 construct comprising the miR183 binding site series was able to reduce GBA1 expression in the presence of the corresponding microRNA (miR183).

[1043] De-targeting of GBA1 expression in the DRG was also investigated in rat embryonic DRG neurons. The rat embryonic DRG neurons were transduced with AAV2.GBA_VG33 (comprises the miR183 binding site series) or AAV2.GBA_VG17 control at an MOI of 10^{3.5} or 10^{4.5}, or a no AAV control. GCase activity was measured as RFU/mL per mg of total protein. As shown in FIG. 7, GCase activity was significantly reduced in the rat embryonic DRG neurons transduced with AAV2.GBA_VG33 compared to those transfected with AAV2.GBA_VG17, at both MOIs tested. Also, the levels of GCase activity measured in the rat embryonic DRG neurons transduced with AAV2.GBA_VG33 at both MOIs was similar to the level of GCase measured in the no AAV control.

[1044] Taken together, these data demonstrate that successful GBA1 expression de-targeting in the DRG was achieved with the GBA_VG33 (SEQ ID NO: 1828), comprising a codon-optimized nucleotide sequence (SEQ ID NO: 1773) encoding the GBA1 protein and the miR183 binding site series (SEQ ID NO: 1849).

### Example 18: In Vivo Evaluation of a Vectorized Viral Genome Comprising a Codon-Optimized, CpG Depleted Nucleotide Sequence Encoding GBA1 in Wildtype Mice

[1045] This Example investigates the distribution and efficacy of two viral genome constructs: GB_VG35 (SEQ ID NO: 2006) and GB_VG36 (SEQ ID NO: 2007), each comprising a codon-optimized, CpG-depleted nucleotide sequence (SEQ ID NO: 2002) encoding a GBA1 protein and vectorized in a VOY101 capsid (VOY101.GBA_VG35 and VOY101.GBA_VG36) in wild-type C57BL/6 mice. In addition, the viral construct VOY101.GBA_VG17 is also assessed.

[1046] Mice were intravenously injected with 2e13 VG/kg of VOY101.GBA_VG35, VOY101.GBA_VG36, VOY101.GBA_VG17 (see Example 16), or a vehicle control, into the lateral tail vein. At 28-days post IV injection, various CNS tissues (e.g., cortex, striatum, hippocampus, thalamus, cerebellum, brainstem, and/or spinal cord) and peripheral tissues (e.g., heart, liver, and/or spleen) were harvested to measure viral genome (VG) biodistribution (VG/cell), GCase activity, and GBA1 mRNA expression (transgene specific and endogenous).

[1047] VG biodistributions in the cortex, brainstem, and striatum are shown in FIG. 9. All VG values are presented as mean and standard deviation and statistical analysis was done using 1-way ANOVA and Tukey HSD post-hoc test.

[1048] GCase activities (measured as nM 4mu pdct/mg protein) in the cortex, striatum, and brainstem are shown in FIG. 10.

### Example 19: In Vivo Evaluation of a Vectorized Viral Genome Comprising a Codon-Optimized, CpG Depleted Nucleotide Sequence Encoding GBA1 in 4L-PS/NA Mice

[1049] This Example investigates the distribution, GCase activities, and substrate reduction of two viral genome constructs: GB_VG35 (SEQ ID NO: 2006) and GB_VG36 (SEQ ID NO: 2007), each comprising a codon-optimized, CpG-depleted nucleotide sequence (SEQ ID NO: 2002) encoding a GBA1 protein and vectorized in a single-stranded VOY101 capsid (ssVOY101.GBA_VG35 and ssVOY101.GBA_VG36) in 4L-PS/NA mice. In addition, single-stranded VOY101 comprising a codon-optimized nucleotide sequence (SEQ ID NO: 1773) encoding a GBA1 protein is also assessed (ssVOY101.GBA_VG17).

[1050] Mice were intravenously administered 2e13 VG/kg of one of the three viral genome constructs or a vehicle control via lateral tail injection. At 28-days post IV injection, various CNS tissues (e.g., cortex, striatum, hippocampus, thalamus, cerebellum, brainstem, and/or spinal cord) and peripheral tissues (e.g., heart, liver, and/or spleen) were harvested to measure viral genome (VG) biodistribution (VG/cell), GCase activity, and substrate reduction.

[1051] Biodistributions and GCase activities in the brainstem and DRGs are shown in FIG. 11. ssVOY101.GBA_VG36 showed significant reduction in GBA1 expression & GCase activities in DRGs, but retain expression and activities in brain stem.

[1052] The substrates glucosylceramide and glucosylsphingosine were quantified in the brain stem, striatum, and DRGs by LC/MS-MS. Significant substrate reduction was observed in both brain stem and striatum with all three constructs (FIG. 12). DRG substrates were not significantly changed. Also, the significantly reduced GBA1 mRNA levels obtained in DRGs using ssVOY101.GBA_VG36 resulted in reduced potential toxicity. These data demonstrate that both ssVOY101.GBA_VG35 and ssVOY101.GBA_VG36 exhibited a desired biodistribution profile and were effective in reducing substrate levels in brain tissues.

### Example 20: In Vivo Evaluation of a Vectorized Viral Genome Comprising an HA-tagged Nucleotide Sequence Encoding GBA1 in Wildtype Mice

[1053] This Example investigates the distribution and efficacy of GBA_VG17-VP and GBA_VG17-VE comprising a codon-optimized nucleotide sequence (SEQ ID NO: 1773) encoding a GBA1 protein, and GBA_VG17-HA comprising a codon-optimized nucleotide sequence (SEQ ID NO: 1773) encoding a GBA1 and further comprising an HA-tag. Both constructs were vectorized in a VOY101 capsid (VOY101.GBA_VG17 and VOY101.GBA_VG17-HA) for administration in wild-type C57BL/6 mice.

[1054] Mice were intravenously injected with 2e13 VG/kg of VOY101.GBA_VG17 and VOY101.GBA_VG17-HA into the lateral tail vein. At 28-days post IV injection, various CNS tissues (e.g., cortex, striatum, hippocampus, thalamus, cerebellum, brainstem, and/or spinal cord) and peripheral tissues (e.g., heart, liver, and/or spleen) were harvested to measure viral genome (VG) biodistribution (VG/cell), GCase activity, and GBA1 mRNA expression (transgene specific and endogenous).

[1055] Biodistribution in the cortex and GCase activities in the cortex, striatum, and brainstem are shown in FIG. 13. VOY101.GBA_VG17-HA showed comparable GCase activity as VOY101.GB_VG17.

[1056] Immunohistochemical assessments of GBA1 or GBA1-HA expression in the cortex, striatum, brainstem, cerebellum, thalamus, and hippocampus are shown in FIGS. 14A and 14B. VOY101.GBA_VG17-HA showed robust HA expression in all regions evaluated. No HA signal was detected in mice injected with VOY101.GBA_VG17.

### IX. Equivalents and Scope

[1057] Those skilled in the art will recognize, or be able to ascertain using no more than routine experimentation, many equivalents to the specific embodiments in accordance with the Detailed Description provided herein. The scope of the present disclosure is not intended to be limited to the above Detailed Description, but rather is as set forth in the appended claims.

[1058] In the claims, articles such as “a,” “an,” and “the” may mean one or more than one unless indicated to the contrary or otherwise evident from the context. Claims or descriptions that include “or” between one or more members of a group are considered satisfied if one, more than one, or all of the group members are present in, employed in, or otherwise relevant to a given product or process unless indicated to the contrary or otherwise evident from the context. The disclosure includes embodiments in which exactly one member of the group is present in, employed in, or otherwise relevant to a given product or process. The disclosure includes embodiments in which more than one, or the entire group members are present in, employed in, or otherwise relevant to a given product or process.

[1059] It is also noted that the term “comprising” is intended to be open and permits but does not require the inclusion of additional elements or steps. When the term “comprising” is used herein, the term “consisting of” is thus also encompassed and disclosed.

[1060] Where ranges are given, endpoints are included. Furthermore, it is to be understood that unless otherwise indicated or otherwise evident from the context and understanding of one of ordinary skill in the art, values that are expressed as ranges can assume any specific value or subrange within the stated ranges in different embodiments of the disclosure, to the tenth of the unit of the lower limit of the range, unless the context clearly dictates otherwise.

[1061] In addition, it is to be understood that any particular embodiment of the present disclosure that falls within the prior art may be explicitly excluded from any one or more of the claims. Since such embodiments are deemed to be known to one of ordinary skill in the art, they may be excluded even if the exclusion is not set forth explicitly herein. Any particular embodiment of the compositions of the disclosure (e.g., any, composition, therapeutic or active ingredient; any method of production; any method of use; etc.) can be excluded from any one or more claims, for any reason, whether or not related to the existence of prior art.

[1062] It is to be understood that the words which have been used are words of description rather than limitation, and that changes may be made within the purview of the appended claims without departing from the true scope and spirit of the disclosure in its broader aspects.

[1063] While the present disclosure has been described at some length and with some particularity with respect to the several described embodiments, it is not intended that it should be limited to any such particulars or embodiments or any particular embodiment, but it is to be construed with references to the appended claims so as to provide the broadest possible interpretation of such claims in view of the prior art and, therefore, to effectively encompass the intended scope of the disclosure.

[1064] All publications, patent applications, patents, and other references mentioned herein are incorporated by reference in their entirety. In case of conflict, the present specification, including definitions, will control. In addition, section headings, the materials, methods, and examples are illustrative only and not intended to be limiting.

What is claimed is:

1. An isolated nucleic acid comprising a nucleotide sequence that encodes a β-glucocerebrosidase 1 (GBA1) protein and is at least 93% identical (e.g., at least 93%, at least 94%, at least 95%, at least 96%, at least 97%, at least 98%, at least 99%, or 100% identical) to the nucleotide sequence of SEQ ID NO: 2002.

2. The isolated nucleic acid of claim 1, wherein the nucleotide sequence encoding the GBA1 protein comprises a nucleotide sequence that is at least 95% identical (e.g., at least 95%, at least 96%, at least 97%, at least 98%, at least 99%, or 100% identical) to SEQ ID NO: 2002.

3. The isolated nucleic acid of claim 1 or claim 2, wherein the nucleotide sequence encoding the GBA1 protein comprises SEQ ID NO: 2002.

4. The isolated nucleic acid of any one of claims 1-3, further comprising a signal sequence comprising a nucleotide sequence that is at least 90% identical (e.g., at least 90%, at least 91%, at least 92%, at least 93%, at least 94%, at least 95%, at least 96%, at least 97%, at least 98%, at least 99%, or 100% identical) to SEQ ID: 2005.

5. The isolated nucleic acid of claim 4, wherein the signal sequence comprises the nucleotide sequence of SEQ ID NO: 2005.

6. An isolated nucleic acid comprising a nucleotide sequence that encodes a β-glucocerebrosidase 1 (GBA1) protein and is at least 94% identical (e.g., at least 94%, at least 95%, at least 96%, at least 97%, at least 98%, at least 99%, or 100% identical) to the nucleotide sequence of SEQ ID NO: 2001.

7. The isolated nucleic acid of claim 6, wherein the nucleotide sequence encoding the GBA1 protein comprises the nucleotide sequence of SEQ ID NO: 2001.

8. A recombinant viral genome comprising a nucleotide sequence encoding a β-glucocerebrosidase 1 (GBA1) protein, wherein the recombinant viral genome further comprises an miRNA (miR) binding site that modulates expression of the encoded GBA1 protein in a cell or tissue of the DRG, liver, hematopoietic lineage, or a combination thereof; wherein the recombinant viral genome comprises a GBA1-encoding nucleotide sequence that is at least 93% identical (e.g., at least 93%, at least 94%, at least 95%, at least 96%, at least 97%, at least 98%, at least 99%, or 100% identical) to the nucleotide sequence of SEQ ID NO: 2002.

9. The recombinant viral genome of claim 8, wherein the nucleotide sequence encoding the GBA1 protein comprises a nucleotide sequence that is at least 95% identical (e.g., at least 95%, at least 96%, at least 97%, at least 98%, at least 99%, or 100% identical) to the nucleotide sequence of SEQ ID NO: 2002.

10. The recombinant viral genome of claim 8 or claim 9, wherein the nucleotide sequence encoding the GBA1 protein comprises or consists of the nucleotide sequence of SEQ ID NO: 2002.

11. The recombinant viral genome of any one of claims 8-10, further comprising a promoter operably linked to the nucleic acid comprising the nucleotide sequence encoding the GBA protein, wherein, optionally, the promoter comprises a nucleotide sequence that is at least 90% identical (e.g., at least 90%, at least 91%, at least 92%, at least 93%, at least 94%, at least 95%, at least 96%, at least 97%, at least 98%, at least 99%, or 100% identical) to the nucleotide sequence of SEQ ID NO: 1834, wherein, further optionally, the promoter comprises or consists of the nucleotide sequence of SEQ ID NO: 1834.

12. The recombinant viral genome of any one of claims 8-11, further comprising an enhancer.

13. The recombinant viral genome of claim 12, wherein the enhancer comprises a CMVie enhancer; wherein, optionally, the CMVie enhancer comprises a nucleotide sequence that is at least 90% identical (e.g., at least 90%, at least 91%, at least 92%, at least 93%, at least 94%, at least 95%, at least 96%, at least 97%, at least 98%, at least 99%, or 100% identical) to the nucleotide sequence of SEQ ID NO: 1831; wherein, further optionally, the CMVie enhancer comprises or consists of the nucleotide sequence of SEQ ID NO: 1831.

14. The recombinant viral genome of any one of claims 8-13, further comprising an intron sequence; wherein, optionally, the intron sequence comprises a nucleotide sequence that is at least 90% identical (e.g., at least 90%, at least 91%, at least 92%, at least 93%, at least 94%, at least 95%, at least 96%, at least 97%, at least 98%, at least 99%, or 100% identical) to the nucleotide sequence of SEQ ID NO: 1842; wherein, further optionally, the intron sequence comprises or consists of the nucleotide sequence of SEQ ID NO: 1842.

15. The recombinant viral genome of any one of claims 8-14, further comprising a polyadenylation (polyA) sequence; wherein, optionally, the polyA sequence comprises a nucleotide sequence that is at least 90% identical (e.g., at least 90%, at least 91%, at least 92%, at least 93%, at least 94%, at least 95%, at least 96%, at least 97%, at least 98%, at least 99%, or 100% identical) to the nucleotide sequence of SEQ ID NO: 1846; wherein, further optionally, the polyA sequence comprises or consists of the nucleotide sequence of SEQ ID NO: 1846.

16. The recombinant viral genome of any one of claims 8-15, further comprising an ITR sequence; wherein, optionally, the ITR sequence comprises a nucleotide sequence that is at least 90% identical (e.g., at least 90%, at least 91%, at least 92%, at least 93%, at least 94%, at least 95%, at least 96%, at least 97%, at least 98%, at least 99%, or 100% identical) to the nucleotide sequence of SEQ ID NO: 1829 or SEQ ID NO: 1830; wherein, further optionally, the ITR sequence comprises or consists of the nucleotide sequence of SEQ ID NO: 1829 or SEQ ID NO: 1830.

17. The recombinant viral genome of claim 16, comprising a 5′ ITR sequence and a 3′ ITR sequence, wherein the 5′ ITR sequence comprises or consists of the nucleotide sequence of SEQ ID NO: 1829 and the 3′ ITR comprises or consists of the nucleotide sequence of SEQ ID NO: 1830.

18. The recombinant viral genome of any one of claims 8-17, further comprising one or more miR183 binding sites; wherein, optionally, the viral genome comprises four miR183 binding sites; wherein, further optionally, each of the four miR183 binding sites comprises or consists of the nucleotide sequence of SEQ ID NO: 1847 or a nucleotide sequence that has up to 3 modifications relative to SEQ ID NO: 1847.

19. The recombinant viral genome of any one of claims 8-17, further comprising a miR183 binding site series comprising a nucleotide sequence that is at least 95% identical (e.g., at least 95%, at least 96%, at least 97%, at least 98%, at least 99%, or 100% identical) to the nucleotide sequence of SEQ ID NO: 1849; wherein, optionally, the miR183 binding site series comprises or consists of the nucleotide sequence of SEQ ID NO: 1849.

20. The recombinant viral genome of any one of claims 8-17, wherein the viral genome does not comprise a miR183 binding site.

21. A recombinant viral genome comprising, in 5′ to 3′ order:
(i) a 5′ adeno-associated (AAV) ITR comprising or consisting of the nucleotide sequence of SEQ ID NO: 1829 or a nucleotide sequence at least 95% identical (e.g., at least 95%, at least 96%, at least 97%, at least 98%, or at least 99% identical) thereto;
(ii) a CMVie enhancer comprising or consisting of the nucleotide sequence SEQ ID NO: 1831 or a nucleotide sequence at least 95% identical (e.g., at least 95%, at least 96%, at least 97%, at least 98%, or at least 99% identical) thereto;
(iii) a CB promoter comprising or consisting of the nucleotide sequence of SEQ ID NO: 1834, or a nucleotide sequence at least 95% identical (e.g., at least 95%, at least 96%, at least 97%, at least 98%, or at least 99% identical) thereto;
(iv) an intron comprising or consisting of the nucleotide sequence of SEQ ID NO: 1842, or a nucleotide sequence at least 95% identical (e.g., at least 95%, at least 96%, at least 97%, at least 98%, or at least 99% identical) thereto;
(v) a nucleotide sequence encoding a signal sequence, wherein the nucleotide sequence comprises or consists of the nucleotide sequence of SEQ ID NO: 2005, or a nucleotide sequence at least 95% identical (e.g., at least 95%, at least 96%, at least 97%, at least 98%, or at least 99% identical) thereto;
(vi) a nucleotide sequence encoding a GBA1 protein, wherein the nucleotide sequence encoding the GBA1 protein comprises or consists of the nucleotide sequence of SEQ ID NO: 2002 or a nucleotide sequence at least 93% identical (e.g., at least 93%, at least 94%, at least 95%, at least 96%, at least 97%, at least 98%, or at least 99% identical) thereto;
(vii) a polyA signal region comprising or consisting of the nucleotide sequence of SEQ ID NO: 1846, or a nucleotide sequence at least 95% identical (e.g., at least 95%, at least 96%, at least 97%, at least 98%, or at least 99% identical) thereto; and
(viii) a 3′ AAV ITR comprising or consisting of the nucleotide sequence of SEQ ID NO: 1830, or a nucleotide sequence at least 95% identical (e.g., at least 95%, at least 96%, at least 97%, at least 98%, or at least 99% identical) thereto.

22. The recombinant viral genome of claim 21, wherein:
(i) the 5′ AAV ITR comprises or consists of the nucleotide sequence of SEQ ID NO: 1829;
(ii) the CMVie enhancer comprises or consists of the nucleotide sequence of SEQ ID NO: 1831;
(iii) the CB promoter or functional variant thereof comprises or consists of the nucleotide sequence of SEQ ID NO: 1834;
(iv) the intron comprises or consists of the nucleotide sequence of SEQ ID NO: 1842;
(v) the nucleotide sequence encoding the signal sequence comprises or consists of the nucleotide sequence of SEQ ID NO: 2005;
(vi) the nucleotide sequence encoding the GBA1 protein comprises or consists of the nucleotide sequence of SEQ ID NO: 2002;
(vii) the polyA signal region comprises or consists of the nucleotide sequence of SEQ ID NO: 1846; and
(viii) the 3′ AAV ITR comprises or consists of the nucleotide sequence of SEQ ID NO: 1830.

23. The recombinant viral genome of claim 22, comprising the nucleotide sequence of SEQ ID NO: 2006, or a nucleotide sequence at least 97% identical (e.g., at least 97%, at least 98%, or at least 99% identical) thereto.

24. The recombinant viral genome of claim 22 or claim 23, comprising the nucleotide sequence of SEQ ID NO: 2006.

25. The recombinant viral genome of any one of claims 22-24, consisting of the nucleotide sequence of SEQ ID NO: 2006.

26. A recombinant viral genome comprising in 5′ to 3′ order:
(i) a 5′ adeno-associated (AAV) ITR comprising or consisting of the nucleotide sequence of SEQ ID NO: 1829, or a nucleotide sequence at least 95% identical (e.g., at least 95%, at least 96%, at least 97%, at least 98%, or at least 99% identical) thereto;
(ii) a CMVie enhancer comprising or consisting of the nucleotide sequence of SEQ ID NO: 1831, or a nucleotide sequence at least 95% identical (e.g., at least 95%, at least 96%, at least 97%, at least 98%, or at least 99% identical) thereto;
(iii) a CB promoter comprising or consisting of the nucleotide sequence of SEQ ID NO: 1834, or a nucleotide sequence at least 95% identical (e.g., at least 95%, at least 96%, at least 97%, at least 98%, or at least 99% identical) thereto;
(iv) an intron comprising or consisting of the nucleotide sequence of SEQ ID NO: 1842, or a nucleotide sequence at least 95% identical (e.g., at least 95%, at least 96%, at least 97%, at least 98%, or at least 99% identical) thereto;
(v) a nucleotide sequence encoding a signal sequence, optionally wherein the nucleotide sequence encoding the signal sequence comprises or consists of the nucleotide sequence of SEQ ID NO: 2005, or a nucleotide sequence at least 95% identical (e.g., at least 95%, at least 96%, at least 97%, at least 98%, or at least 99% identical) thereto;
(vi) a nucleotide sequence encoding a GBA1 protein comprising or consisting of the nucleotide sequence of SEQ ID NO: 2002 or a nucleotide sequence at least 93% identical (e.g., at least 93%, at least 94%, at least 95%, at least 96%, at least 97%, at least 98%, or at least 99% identical) to the nucleotide sequence of SEQ ID NO: 2002;
(vii) a miR183 binding site series comprising or consisting of the nucleotide sequence of SEQ ID NO: 1849 or a nucleotide sequence at least 90% identical (e.g., at least 90%, at least 91%, at least 92%, at least 93%, at least 94%, at least 95%, at least 96%, at least 97%, at least 98%, or at least 99% identical) thereto;
(viii) a polyA signal region comprising or consisting of the nucleotide sequence of SEQ ID NO: 1846, or a nucleotide sequence at least 95% identical (e.g., at least 93%, at least 94%, at least 95%, at least 96%, at least 97%, at least 98%, or at least 99% identical) thereto; and
(ix) a 3′ AAV ITR comprising or consisting of the nucleotide sequence of SEQ ID NO: 1830, or a nucleotide sequence at least 95% identical (e.g., at least 95%, at least 96%, at least 97%, at least 98%, or at least 99% identical) thereto.

27. The recombinant viral genome of claim 26, wherein:
(i) the 5′ AAV ITR comprises or consists of the nucleotide sequence of SEQ ID NO: 1829;
(ii) the CMVie enhancer comprises or consists of the nucleotide sequence of SEQ ID NO: 1831;
(iii) the CB promoter or functional variant thereof comprises or consists of the nucleotide sequence of SEQ ID NO: 1834;
(iv) the intron comprises or consists of the nucleotide sequence of SEQ ID NO: 1842;
(v) the nucleotide sequence encoding the signal sequence comprises the nucleotide sequence of SEQ ID NO: 2005;
(vi) the nucleotide sequence encoding the GBA1 protein comprises or consists of the nucleotide sequence of SEQ ID NO: 2002;
(vii) the miR183 binding site series comprises or consists of the nucleotide sequence of SEQ ID NO: 1849;
(viii) the polyA signal region comprises or consists of the nucleotide sequence of SEQ ID NO: 1846; and
(ix) the 3′ AAV ITR comprises or consists of the nucleotide sequence of SEQ ID NO: 1830.

28. The recombinant viral genome of claim 27, comprising the nucleotide sequence of SEQ ID NO: 2007, or a nucleotide sequence at least 97% identical (e.g., at least 97%, at least 98%, or at least 99% identical) thereto.

29. The recombinant viral genome of claim 27 or claim 28, comprising the nucleotide sequence of SEQ ID NO: 2007.

30. The recombinant viral genome of claim 27 or claim 28, consisting of the nucleotide sequence of SEQ ID NO: 2007.

31. The recombinant viral genome of any one of claims 8-30, further comprising a nucleic acid encoding a capsid protein, wherein the capsid protein comprises a VP1 polypeptide, a VP2 polypeptide, and/or a VP3 polypeptide.

32. The recombinant viral genome of claim 31, wherein the VP1 polypeptide, the VP2 polypeptide, and/or the VP3 polypeptide are encoded by at least one Cap gene.

33. The recombinant viral genome of any one of claims 8-32, further comprising a nucleic acid encoding a Rep protein, wherein the Rep protein comprises a Rep78 protein, a Rep68, Rep52 protein, and/or a Rep40 protein.

34. The recombinant viral genome of claim 33, wherein the Rep78 protein, the Rep68 protein, the Rep52 protein, and/or the Rep40 protein are encoded by at least one Rep gene.

35. An AAV particle comprising:
(i) a capsid protein; and
(ii) the recombinant viral genome of any one of claims 8-30.

36. The AAV particle of claim 35, wherein the capsid protein comprises a VOY101, VOY201, AAVPHP.N (PHP.N), AAVPHP.B (PHP.B), AAVPHP.A (PHP.A), PHP.B2, PHP.B3, G2B4, G2B5, AAV5, AAV9, AAVrh10 capsid protein, or a functional variant thereof.

37. The AAV particle of claim 35 or claim 36, wherein the capsid protein comprises a variant of an AAV5 capsid protein.

38. The AAV particle of claim 35 or claim 36, wherein the capsid protein comprises a variant of an AAV9 capsid protein.

39. A vector comprising the isolated nucleic acid of any one of claims 1-7 or the recombinant viral genome of any one of embodiments 8-34.

40. A cell comprising the isolated nucleic acid of any one of claims 1-7, the recombinant viral genome of any one of claims 8-34, the viral particle of any one of claims 35-38, or the vector of claim 39, wherein, optionally, the cell is a mammalian cell (e.g., an HEK293 cell), an insect cell (e.g., an Sf9 cell), or a bacterial cell.

41. A nucleic acid comprising the recombinant viral genome of any one of embodiments 8-34, and a backbone region suitable for replication of the viral genome in a cell, e.g., a bacterial cell (e.g., wherein the backbone region comprises one or both of a bacterial origin of replication and a selectable marker).

42. A method of making a recombinant AAV particle, the method comprising
(i) providing a host cell comprising the recombinant viral genome of any one of claims 8-34; and
(ii) incubating the host cell under conditions suitable to enclose the viral genome in a capsid protein;
thereby making the isolated AAV particle;
wherein, optionally, the capsid protein is a VOY101 capsid protein.

43. The method of claim 42, further comprising, prior to step (i), introducing a first nucleic acid molecule comprising the viral genome into the host cell.

44. The method of claim 43, wherein the host cell comprises a second nucleic acid molecule encoding a capsid protein, wherein, optionally, the capsid protein is a VOY101 capsid protein.

45. The method of claim 43, further comprising introducing the second nucleic acid into the cell.

46. The method of claim 44 or claim 45, wherein the second nucleic acid molecule is introduced into the host cell prior to, concurrently with, or after the first nucleic acid molecule.

47. The method of any one of claims 42-46, wherein the host cell comprises a mammalian cell (e.g., an HEK293 cell), an insect cell (e.g., an Sf9 cell), or a bacterial cell.

48. A pharmaceutical composition comprising the AAV particle of any one of claims 35-38, and a pharmaceutically acceptable excipient.

49. A method of delivering a nucleic acid sequence encoding a GBA1 protein to a subject, comprising administering an effective amount of the pharmaceutical composition of claim 48, the AAV particle of any one of claims 35-38, the isolated nucleic acid of any one claims 1-7, or the recombinant viral genome of any one of claims 8-34, thereby delivering the nucleic acid encoding a GBA1 protein to the subject.

50. The method of claim 49, wherein the subject has, has been diagnosed with having, or is at risk of having a disease associated with expression of GBA1, e.g., aberrant or reduced GBA1 expression, e.g., expression of an GBA1 gene, GBA1 mRNA, and/or GBA1 protein.

51. The method of claim 49 or claim 50, wherein the subject has, has been diagnosed with having, or is at risk of having a neurodegenerative or neuromuscular disorder.

52. A method of treating a subject having or diagnosed with having a disease associated with GBA1 expression comprising administering an effective amount of the pharmaceutical composition of claim 48, the AAV particle of any one of claims 35-38, the isolated nucleic acid of any one claims 1-7, or the recombinant viral genome of any one of claims 8-34, thereby treating the disease associated with GBA1 expression in the subject.

53. A method of treating a subject having or diagnosed with having a neurodegenerative or neuromuscular disorder, comprising administering an effective amount of the pharmaceutical composition of claim 48, the AAV particle of any one of claims 35-38, the isolated nucleic acid of any one claims 1-7, or the recombinant viral genome of any one of claims 8-34, thereby treating the neurodegenerative or neuromuscular disorder in the subject.

54. The method of any one of claims 49-53, wherein the disease associated with GBA1 expression or the neurodegenerative or neuromuscular disorder is Parkinson's Disease (PD).

55. The method of any one of claims 49-53, wherein the disease associated with GBA1 expression or the neurodegenerative or neuromuscular disorder is Gaucher Disease (GD).

56. The method of claim 55, wherein the GD is type 1 GD (GD1) or type 3 GD (GD3).

57. The method of any one of claims 49-53, wherein the disease associated with GBA1 expression or the neurodegenerative or neuromuscular disorder is Dementia with Lewy Bodies (DLB).

58. A method of treating a subject having or diagnosed with having Parkinson's Disease (PD) comprising administering an effective amount of the pharmaceutical composition of claim 48, the AAV particle of any one of claims 35-38, the isolated nucleic acid of any one claims 1-7, or the recombinant viral genome of any one of claims 8-34, thereby treating PD in the subject.

59. A method of treating a subject having or diagnosed with having Gaucher Disease (GD) comprising administering an effective amount of the pharmaceutical composition of claim 48, the AAV particle of any one of claims 35-38, the isolated nucleic acid of any one claims 1-7, or the recombinant viral genome of any one of claims 8-34, thereby treating GD in the subject.

60. The method of claim 59, wherein the GD is GD1 or GD3.

61. A method of treating a subject having or diagnosed with having Dementia with Lewy Bodies (DLB) comprising administering an effective amount of the pharmaceutical composition of claim 48, the AAV particle of any one of claims 35-38, the isolated nucleic acid of any one claims 1-7, or the recombinant viral genome of any one of claims 8-34, thereby treating DLB in the subject.

62. The method of any one of claims 49-61, wherein the subject has a reduced level of GCase activity as compared to a reference level; wherein, optionally, the level of GCase activity is measured by a 4-MUG assay or a SensoLyte Blue Glucocerebrosidase assay.

63. The method of claim 62, wherein the reference level comprises the level of GCase activity in a healthy subject who does not have a disease associated with GBA1 expression, a neuromuscular disorder, and/or a neurodegenerative disorder.

64. The method of any one of claims 49-63, wherein treating comprises prevention of progression of the disease in the subject.

65. The method of any one of claims 49-64, wherein treating results in amelioration of at least one symptom of the disease associated with GBA1 expression, the neurodegenerative disorder, and/or the neuromuscular disorder in the subject.

66. The method of claim 65, wherein the symptom of the disease associated with GBA1 expression, the neurodegenerative disorder, and/or the neuromuscular disorder comprises reduced GCase activity, accumulation of glucocerebroside and other glycolipids, e.g., within immune cells (e.g., macrophages), build-up of synuclein aggregates (e.g., Lewy bodies), developmental delay, progressive encephalopathy, progressive dementia, ataxia, myoclonus, oculomotor dysfunction, bulbar palsy, generalized weakness, trembling of a limb, depression, visual hallucinations, cognitive decline, or a combination thereof.

67. The method of any one of claims 49-66, wherein the subject is a human subject.

68. The method of any one of claims 49-67, wherein the subject has one or more mutations in a GBA1 gene, a GBA1 mRNA, and/or a GBA1 protein.

69. The method of any one of claims 49-68, wherein the pharmaceutical composition, the AAV particle, the isolated nucleic acid, or the recombinant viral genome is administered to the subject intravenously, intracerebrally, via intrathalamic (ITH) administration, intramuscularly, intrathecally, intracerebroventricularly, via intraparenchymal administration, via focused ultrasound (FUS), e.g., coupled with the intravenous administration of microbubbles (FUS-MB), or MRI-guided FUS coupled with intravenous administration, or via intra-cisterna magna injection (ICM).

70. The method of any one of claims 49-69, wherein the pharmaceutical composition, the AAV particle, the isolated nucleic acid, or the recombinant viral genome is administered to the subject intravenously.

71. The method of any one of claims 49-70, wherein the pharmaceutical composition, the AAV particle, the isolated nucleic acid, or the recombinant viral genome is delivered to a cell, tissue, or region of the CNS, e.g., a region of the brain or spinal cord, e.g., the parenchyma, the cortex, substantia nigra, caudate cerebellum, striatum, corpus callosum, cerebellum, brain stem caudate-putamen, thalamus, superior colliculus, the spinal cord, or a combination thereof.

72. The method of any one of claims 49-71, which further comprises evaluating, e.g., measuring, the level of GBA1 expression, e.g., GBA1 gene, GBA1 mRNA, and/or GBA1 protein expression, in the subject, e.g., in a cell, tissue, or fluid, of the subject, optionally wherein the level of GBA1 protein is measured by an assay described herein, e.g., an ELISA, a Western blot, or an immunohistochemistry assay.

73. The method of claim 72, wherein measuring the level of GBA1 expression is performed prior to, during, or subsequent to treatment with the AAV particle.

74. The method of 72 or 73, wherein the cell or tissue is a cell or tissue of the central nervous system (e.g., parenchyma).

75. The method of any one of claims 49-74, wherein the administration results in increased level of GBA1 protein expression in a cell or tissue of the subject, relative to reference level, e.g., a subject that has not received treatment, e.g., has not been administered the AAV particle.

76. The method of any one of claims 49-75, which further comprises evaluating, e.g., measuring, the level of GCase activity in the subject, e.g., in a cell or tissue of the subject, optionally wherein the level of GCase activity is measured by a 4-MUG assay or a SensoLyte Blue Glucocerebrosidase assay.

77. The method of any one of claims 49-76, wherein the administration results in an increase in at least one, two, or all of:
(i) the level of GCase activity in a cell, tissue, (e.g., a cell or tissue of the CNS, e.g., the cortex, striatum, thalamus, cerebellum, and/or brainstem), and/or fluid (e.g., CSF and/or serum), of the subject, optionally wherein the level of GCase activity is increased by at least 2, 3, 4, or 5 fold, as compared to a reference level, e.g., a subject that has not received treatment, e.g., has not been administered the AAV particle;
(ii) the level of viral genomes (VG) per cell in a CNS tissue (e.g., the cortex, striatum, thalamus, cerebellum, brainstem, and/or spinal cord) of the subject, optionally wherein the VG level is increased by greater than 50 VGs per cell, as compared to a peripheral tissue, wherein the level of VGs per cell is at least 4-10 fold lower than the levels in the CNS tissue, e.g., as measured by an assay as described herein; and/or
(iii) the level of GBA1 mRNA expression in a cell or tissue (e.g., a cell or tissue of the CNS, e.g., the cortex, thalamus, and/or brainstem), optionally wherein the level of GBA1 mRNA is increased by at least 100-1300 fold as compared to a reference level from a subject that has not received the treatment.

78. The method of any one of claims 49-77, further comprising administration of an additional therapeutic agent and/or therapy suitable for treatment or prevention of the disease associated GBA1 expression, the neurodegenerative disorder, and/or the neuromuscular disorder; wherein, optionally, the additional therapeutic agent and/or therapy comprises enzyme replacement therapy (ERT) (e.g., imiglucerase, velaglucerase alfa, or taliglucerase alfa); substrate reduction therapy (SRT) (e.g., eliglustat or miglustat), blood transfusion, levodopa, carbidopa, Safinamide, dopamine agonists (e.g., pramipexole, rotigotine, or ropinirole), anticholinergics (e.g., benztropine or trihexyphenidyl), cholinesterase inhibitors (e.g., rivastigmine, donepezil, or galantamine), an N-methyl-d-aspartate (NMDA) receptor antagonist (e.g., memantine), or a combination thereof.

79. The pharmaceutical composition of claim 48, the AAV particle of any one of claims 35-38, the isolated nucleic acid of any one claims 1-7, or the recombinant viral genome of any one of claims 8-34, for use in the manufacture of a medicament.

80. The pharmaceutical composition of claim 48, the AAV particle of any one of claims 35-38, the isolated nucleic acid of any one claims 1-7, or the recombinant viral genome of any one of claims 8-34, for use in the treatment of a disease associated with GBA1 expression, a neuromuscular and/or a neurodegenerative disorder; wherein, the disease associated with GBA1 expression, a neuromuscular and/or a neurodegenerative disorder is PD.

81. Use of an effective amount of the pharmaceutical composition of claim 48, the AAV particle of any one of claims 35-38, the isolated nucleic acid of any one claims 1-7, or the recombinant viral genome of any one of claims 8-34, for use in the manufacture of a medicament for the treatment of a disease associated with GBA1 expression, a neuromuscular and/or a neurodegenerative disorder; wherein, the disease associated with GBA1 expression, a neuromuscular and/or a neurodegenerative disorder is PD.

82. The pharmaceutical composition of claim 48, the AAV particle of any one of claims 35-38, the isolated nucleic acid of any one claims 1-7, or the recombinant viral genome of any one of claims 8-34, for use in the treatment of a disease associated with GBA1 expression, a neuromuscular and/or a neurodegenerative disorder; wherein, the disease associated with GBA1 expression, a neuromuscular and/or a neurodegenerative disorder is GD.

83. The pharmaceutical composition, the AAV particle, the isolated nucleic acid, or the recombinant viral genome for use of claim 82, wherein the GD is GD1.

84. The pharmaceutical composition, the AAV particle, the isolated nucleic acid, or the recombinant viral genome for use of claim 82, wherein the GD is GD3.

85. Use of an effective amount of the pharmaceutical composition of claim 48, the AAV particle of any one of claims 35-38, the isolated nucleic acid of any one claims 1-7, or the recombinant viral genome of any one of claims 8-34, for use in the manufacture of a medicament for the treatment of a disease associated with GBA1 expression, a neuromuscular and/or a neurodegenerative disorder; wherein, the disease associated with GBA1 expression, a neuromuscular and/or a neurodegenerative disorder is GD.

86. The use of claim 85, wherein the GD is GD1.

87. The use of claim 85, wherein the GD is GD3.

The application's sequence listing, which the Patent Office published only in electronic form, follows.

SEQUENCE LISTING (3648 sequences)

SEQ ID NO: 1 - protein, 743 aa, synthetic construct
  REGION 1..743: note = source = /note="Description of Artificial Sequence: Synthetic polypeptide"
MAADGYLPDWLEDNLSEGIREWWALKPGAPQPKANQQHQDNARGLVLPGYKYLGPGNGLDKGEPVNAADAAALEHDKAYDQQLKAGDNPYLKYNHADAEFQERLKEDTSFGGNLGRAVFQAKKRLLEPLGLVEEAAKTAPGKKRPVEQSPQEPDSSAGIGKSGAQPAKKRLNFGQTGDTESVPDPQPIGEPPAAPSGVGSLTMASGGGAPVADNNEGADGVGSSSGNWHCDSQWLGDRVITTSTRTWALPTYNNHLYKQISNSTSGGSSNDNAYFGYSTPWGYFDFNRFHCHFSPRDWQRLINNNWGFRPKRLNFKLFNIQVKEVTDNNGVKTIANNLTSTVQVFTDSDYQLPYVLGSAHEGCLPPFPADVFMIPQYGYLTLNDGSQAVGRSSFYCLEYFPSQMLRTGNNFQFSYEFENVPFHSSYAHSQSLDRLMNPLIDQYLYYLSKTINGSGQNQQTLKFSVAGPSNMAVQGRNYIPGPSYRQQRVSTTVTQNNNSEFAWPGASSWALNGRNSLMNPGPAMASHKEGEDRFFPLSGSLIFGKQGTGRDNVDADKVMITNEEEIKTTNPVATESYGQVATNHQSDGTLAVPFKAQAQTGWVQNQGILPGMVWQDRDVYLQGPIWAKIPHTDGNFHPSPLMGGFGMKHPPPQILIKNTPVPADPPTAFNKDKLNSFITQYSTGQVSVEIEWELQKENSKRWNPEIQYTSNYYKSNNVEFAVNTEGVYSEPRPIGTRYLTRNL

SEQ ID NO: 2 - DNA, 2232 bp, synthetic construct
  misc_feature 1..2232: note = source = /note="Description of Artificial Sequence: Synthetic polynucleotide"
  source 1..2232: mol_type = other DNA
atggctgccgatggttatcttccagattggctcgaggacaaccttagtgaaggaattcgcgagtggtgggctttgaaacctggagcccctcaacccaaggcaaatcaacaacatcaagacaacgctcgaggtcttgtgcttccgggttacaaataccttggacccggcaacggactcgacaagggggagccggtcaacgcagcagacgcggcggccctcgagcacgacaaggcctacgaccagcagctcaaggccggagacaacccgtacctcaagtacaaccacgccgacgccgagttccaggagcggctcaaagaagatacgtcttttgggggcaacctcgggcgagcagtcttccaggccaaaaagaggcttcttgaacctcttggtctggttgaggaagcggctaagacggctcctggaaagaagaggcctgtagagcagtctcctcaggaaccggactcctccgcgggtattggcaaatcgggtgcacagcccgctaaaaagagactcaatttcggtcagactggcgacacagagtcagtcccagaccctcaaccaatcggagaacctcccgcagccccctcaggtgtgggatctcttacaatggcttcaggtggtggcgcaccagtggcagacaataacgaaggtgccgatggagtgggtagttcctcgggaaattggcattgcgattcccaatggctgggggacagagtcatcaccaccagcacccgaacctgggccctgcccacctacaacaatcacctctacaagcaaatctccaacagcacatctggaggatcttcaaatgacaacgcctacttcggctacagcaccccctgggggtattttgacttcaacagattccactgccacttctcaccacgtgactggcagcgactcatcaacaacaactggggattccggcctaagcgactcaacttcaagctcttcaacattcaggtcaaagaggttacggacaacaatggagtcaagaccatcgccaataaccttaccagcacggtccaggtcttcacggactcagactatcagctcccgtacgtgctcgggtcggctcacgagggctgcctcccgccgttcccagcggacgttttcatgattcctcagtacgggtatctgacgcttaatgatggaagccaggccgtgggtcgttcgtccttttactgcctggaatatttcccgtcgcaaatgctaagaacgggtaacaacttccagttcagctacgagtttgagaacgtacctttccatagcagctacgctcacagccaaagcctggaccgactaatgaatccactcatcgaccaatacttgtactatctctcaaagactattaacggttctggacagaatcaacaaacgctaaaattcagtgtggccggacccagcaacatggctgtccagggaagaaactacatacctggacccagctaccgacaacaacgtgtctcaaccactgtgactcaaaacaacaacagcgaatttgcttggcctggagcttcttcttgggctctcaatggacgtaatagcttgatgaatcctggacctgctatggccagccacaaagaaggagaggaccgtttctttcctttgtctggatctttaatttttggcaaacaaggaactggaagagacaacgtggatgcggacaaagtcatgataaccaacgaagaagaaattaaaactactaacccggtagcaacggagtcctatggacaagtggccacaaaccaccagagtgatgggactttggcggtgccttttaaggcacaggcgcagaccggctgggttcaaaaccaaggaatacttccgggtatggtttggcaggacagagatgtgtacctgcaaggacccatttgggccaaaattcctcacacggacggcaactttcacccttctccgctgatgggagggtttggaatgaagcacccgcctcctcagatcctcatcaaaaacacacctgtacctgcggatcctccaacggccttcaacaaggacaagctgaactctttcatcacccagtattctactggccaagtcagcgtggagatcgagtgggagctgcagaaggaaaacagcaagcgctggaacccggagatccagtacacttccaactattacaagtctaataatgttgaatttgctgttaatactgaaggtgtatatagtgaaccccgccccattggcaccagatacctgactcgtaatctgtaa

SEQ ID NO: 3 - DNA, 2232 bp, synthetic construct
  misc_feature 1..2232: note = source = /note="Description of Artificial Sequence: Synthetic polynucleotide"
  source 1..2232: mol_type = other DNA
atggctgccgatggttatcttccagattggctcgaggacaaccttagtgaaggaattcgcgagtggtgggctttgaaacctggagcccctcaacccaaggcaaatcaacaacatcaagacaacgctcgaggtcttgtgcttccgggttacaaataccttggacccggcaacggactcgacaagggggagccggtcaacgcagcagacgcggcggccctcgagcacgacaaggcctacgaccagcagctcaaggccggagacaacccgtacctcaagtacaaccacgccgacgccgagttccaggagcggctcaaagaagatacgtcttttgggggcaacctcgggcgagcagtcttccaggccaaaaagaggcttcttgaacctcttggtctggttgaggaagcggctaagacggctcctggaaagaagaggcctgtagagcagtctcctcaggaaccggactcctccgcgggtattggcaaatcgggtgcacagcccgctaaaaagagactcaatttcggtcagactggcgacacagagtcagtcccagaccctcaaccaatcggagaacctcccgcagccccctcaggtgtgggatctcttacaatggcttcaggtggtggcgcaccagtggcagacaataacgaaggtgccgatggagtgggtagttcctcgggaaattggcattgcgattcccaatggctgggggacagagtcatcaccaccagcacccgaacctgggccctgcccacctacaacaatcacctctacaagcaaatctccaacagcacatctggaggatcttcaaatgacaacgcctacttcggctacagcaccccctgggggtattttgacttcaacagattccactgccacttctcaccacgtgactggcagcgactcatcaacaacaactggggattccggcctaagcgactcaacttcaagctcttcaacattcaggtcaaagaggttacggacaacaatggagtcaagaccatcgccaataaccttaccagcacggtccaggtcttcacggactcagactatcagctcccgtacgtgctcgggtcggctcacgagggctgcctcccgccgttcccagcggacgttttcatgattcctcagtacgggtatctgacgcttaatgatggaagccaggccgtgggtcgttcgtccttttactgcctggaatatttcccgtcgcaaatgctaagaacgggtaacaacttccagttcagctacgagtttgagaacgtacctttccatagcagctacgctcacagccaaagcctggaccgactaatgaatccactcatcgaccaatacttgtactatctctcaaagactattaacggttctggacagaatcaacaaacgctaaaattcagtgtggccggacccagcaacatggctgtccagggaagaaactacatacctggacccagctaccgacaacaacgtgtctcaaccactgtgactcaaaacaacaacagcgaatttgcttggcctggagcttcttcttgggctctcaatggacgtaatagcttgatgaatcctggacctgctatggccagccacaaagaaggagaggaccgtttctttcctttgtctggatctttaatttttggcaaacaaggaactggaagagacaacgtggatgcggacaaagtcatgataaccaacgaagaagaaattaaaactactaacccggtagcaacggagtcctatggacaagtggccacaaaccaccagagtgcccaaactttggcggtgccttttaaggcacaggcgcagaccggctgggttcaaaaccaaggaatacttccgggtatggtttggcaggacagagatgtgtacctgcaaggacccatttgggccaaaattcctcacacggacggcaactttcacccttctccgctgatgggagggtttggaatgaagcacccgcctcctcagatcctcatcaaaaacacacctgtacctgcggatcctccaacggccttcaacaaggacaagctgaactctttcatcacccagtattctactggccaagtcagcgtggagatcgagtgggagctgcagaaggaaaacagcaagcgctggaacccggagatccagtacacttccaactattacaagtctaataatgttgaatttgctgttaatactgaaggtgtatatagtgaaccccgccccattggcaccagatacctgactcgtaatctgtaa

SEQ ID NO: 4 - protein, 743 aa, synthetic construct
  REGION 1..743: note = source = /note="Description of Artificial Sequence: Synthetic polypeptide"
MAADGYLPDWLEDNLSEGIREWWALKPGAPQPKANQQHQDNARGLVLPGYKYLGPGNGLDKGEPVNAADAAALEHDKAYDQQLKAGDNPYLKYNHADAEFQERLKEDTSFGGNLGRAVFQAKKRLLEPLGLVEEAAKTAPGKKRPVEQSPQEPDSSAGIGKSGAQPAKKRLNFGQTGDTESVPDPQPIGEPPAAPSGVGSLTMASGGGAPVADNNEGADGVGSSSGNWHCDSQWLGDRVITTSTRTWALPTYNNHLYKQISNSTSGGSSNDNAYFGYSTPWGYFDFNRFHCHFSPRDWQRLINNNWGFRPKRLNFKLFNIQVKEVTDNNGVKTIANNLTSTVQVFTDSDYQLPYVLGSAHEGCLPPFPADVFMIPQYGYLTLNDGSQAVGRSSFYCLEYFPSQMLRTGNNFQFSYEFENVPFHSSYAHSQSLDRLMNPLIDQYLYYLSRTINGSGQNQQTLKFSVAGPSNMAVQGRNYIPGPSYRQQRVSTTVTQNNNSEFAWPGASSWALNGRNSLMNPGPAMASHKEGEDRFFPLSGSLIFGKQGTGRDNVDADKVMITNEEEIKTTNPVATESYGQVATNHQSDGTLAVPFKAQAQTGWVQNQGILPGMVWQDRDVYLQGPIWAKIPHTDGNFHPSPLMGGFGMKHPPPQILIKNTPVPADPPTAFNKDKLNSFITQYSTGQVSVEIEWELQKENSKRWNPEIQYTSNYYKSNNVEFAVNTEGVYSEPRPIGTRYLTRNL

SEQ ID NO: 5 - protein, 743 aa, synthetic construct
  REGION 1..743: note = source = /note="Description of Artificial Sequence: Synthetic polypeptide"
MAADGYLPDWLEDNLSEGIREWWALKPGAPQPKANQQHQDNARGLVLPGYKYLGPGNGLDKGEPVNAADAAALEHDKAYDQQLKAGDNPYLKYNHADAEFQERLKEDTSFGGNLGRAVFQAKKRLLEPLGLVEEAAKTAPGKKRPVEQSPQEPDSSAGIGKSGAQPAKKRLNFGQTGDTESVPDPQPIGEPPAAPSGVGSLTMASGGGAPVADNNEGADGVGSSSGNWHCDSQWLGDRVITTSTRTWALPTYNNHLYKQISNSTSGGSSNDNAYFGYSTPWGYFDFNRFHCHFSPRDWQRLINNNWGFRPKRLNFKLFNIQVKEVTDNNGVKTIANNLTSTVQVFTDSDYQLPYVLGSAHEGCLPPFPADVFMIPQYGYLTLNDGSQAVGRSSFYCLEYFPSQMLRTGNNFQFSYEFENVPFHSSYAHSQSLDRLMNPLIDQYLYYLSRTINGSGQNQQTLKFSVAGPSNMAVQGRNYIPGPSYRQQRVSTTVTQNNNSEFAWPGASSWALNGRNSLMNPGPAMASHKEGEDRFFPLSGSLIFGKQGTGRDNVDADKVMITNEEEIKTTNPVATESYGQVATNHQSAQTLAVPFKAQAQTGWVQNQGILPGMVWQDRDVYLQGPIWAKIPHTDGNFHPSPLMGGFGMKHPPPQILIKNTPVPADPPTAFNKDKLNSFITQYSTGQVSVEIEWELQKENSKRWNPEIQYTSNYYKSNNVEFAVNTEGVYSEPRPIGTRYLTRNL

SEQ ID NO: 6 - DNA, 2232 bp, synthetic construct
  misc_feature 1..2232: note = source = /note="Description of Artificial Sequence: Synthetic polynucleotide"
  source 1..2232: mol_type = other DNA
atggctgccgatggttatcttccagattggctcgaggacaaccttagtgaaggaattcgcgagtggtgggctttgaaacctggagcccctcaacccaaggcaaatcaacaacatcaagacaacgctcgaggtcttgtgcttccgggttacaaataccttggacccggcaacggactcgacaagggggagccggtcaacgcagcagacgcggcggccctcgagcacgacaaggcctacgaccagcagctcaaggccggagacaacccgtacctcaagtacaaccacgccgacgccgagttccaggagcggctcaaagaagatacgtcttttgggggcaacctcgggcgagcagtcttccaggccaaaaagaggcttcttgaacctcttggtctggttgaggaagcggctaagacggctcctggaaagaagaggcctgtagagcagtctcctcaggaaccggactcctccgcgggtattggcaaatcgggtgcacagcccgctaaaaagagactcaatttcggtcagactggcgacacagagtcagtcccagaccctcaaccaatcggagaacctcccgcagccccctcaggtgtgggatctcttacaatggcttcaggtggtggcgcaccagtggcagacaataacgaaggtgccgatggagtgggtagttcctcgggaaattggcattgcgattcccaatggctgggggacagagtcatcaccaccagcacccgaacctgggccctgcccacctacaacaatcacctctacaagcaaatctccaacagcacatctggaggatcttcaaatgacaacgcctacttcggctacagcaccccctgggggtattttgacttcaacagattccactgccacttctcaccacgtgactggcagcgactcatcaacaacaactggggattccggcctaagcgactcaacttcaagctcttcaacattcaggtcaaagaggttacggacaacaatggagtcaagaccatcgccaataaccttaccagcacggtccaggtcttcacggactcagactatcagctcccgtacgtgctcgggtcggctcacgagggctgcctcccgccgttcccagcggacgttttcatgattcctcagtacgggtatctgacgcttaatgatggaagccaggccgtgggtcgttcgtccttttactgcctggaatatttcccgtcgcaaatgctaagaacgggtaacaacttccagttcagctacgagtttgagaacgtacctttccatagcagctacgctcacagccaaagcctggaccgactaatgaatccactcatcgaccaatacttgtactatctctctagaactattaacggttctggacagaatcaacaaacgctaaaattcagtgtggccggacccagcaacatggctgtccagggaagaaactacatacctggacccagctaccgacaacaacgtgtctcaaccactgtgactcaaaacaacaacagcgaatttgcttggcctggagcttcttcttgggctctcaatggacgtaatagcttgatgaatcctggacctgctatggccagccacaaagaaggagaggaccgtttctttcctttgtctggatctttaatttttggcaaacaaggtaccggcagagacaacgtggatgcggacaaagtcatgataaccaacgaagaagaaattaaaactactaacccggtagcaacggagtcctatggacaagtggccacaaaccaccagagtgcccaaactttggcggtgccttttaaggcacaggcgcagaccggttgggttcaaaaccaaggaatacttccgggtatggtttggcaggacagagatgtgtacctgcaaggacccatttgggccaaaattcctcacacggacggcaactttcacccttctccgctgatgggagggtttggaatgaagcacccgcctcctcagatcctcatcaaaaacacacctgtacctgcggatcctccaacggccttcaacaaggacaagctgaactctttcatcacccagtattctactggccaagtcagcgtggagatcgagtgggagctgcagaaggaaaacagcaagcgctggaacccggagatccagtacacttccaactattacaagtctaataatgttgaatttgctgttaatactgaaggtgtatatagtgaaccccgccccattggcaccagatacctgactcgtaatctgtaa

SEQ ID NO: 7 - protein, 736 aa, synthetic construct
  REGION 1..736: note = source = /note="Description of Artificial Sequence: Synthetic polypeptide"
MAADGYLPDWLEDNLSEGIREWWALKPGAPQPKANQQHQDNARGLVLPGYKYLGPGNGLDKGEPVNAADAAALEHDKAYDQQLKAGDNPYLKYNHADAEFQERLKEDTSFGGNLGRAVFQAKKRLLEPLGLVEEAAKTAPGKKRPVEQSPQEPDSSAGIGKSGAQPAKKRLNFGQTGDTESVPDPQPIGEPPAAPSGVGSLTMASGGGAPVADNNEGADGVGSSSGNWHCDSQWLGDRVITTSTRTWALPTYNNHLYKQISNSTSGGSSNDNAYFGYSTPWGYFDFNRFHCHFSPRDWQRLINNNWGFRPKRLNFKLFNIQVKEVTDNNGVKTIANNLTSTVQVFTDSDYQLPYVLGSAHEGCLPPFPADVFMIPQYGYLTLNDGSQAVGRSSFYCLEYFPSQMLRTGNNFQFSYEFENVPFHSSYAHSQSLDRLMNPLIDQYLYYLSRTIQSSQTPRQTLKFSVAGPSNMAVQGRNYIPGPSYRQQRVSTTVTQNNNSEFAWPGASSWALNGRNSLMNPGPAMASHKEGEDRFFPLSGSLIFGKQGTGRDNVDADKVMITNEEEIKTTNPVATESYGQVATNHQSAQAQAQTGWVQNQGILPGMVWQDRDVYLQGPIWAKIPHTDGNFHPSPLMGGFGMKHPPPQILIKNTPVPADPPTAFNKDKLNSFITQYSTGQVSVEIEWELQKENSKRWNPEIQYTSNYYKSNNVEFAVNTEGVYSEPRPIGTRYLTRNL

SEQ ID NO: 8 - protein, 743 aa, synthetic construct
  REGION 1..743: note = source = /note="Description of Artificial Sequence: Synthetic polypeptide"
MAADGYLPDWLEDNLSEGIREWWALKPGAPQPKANQQHQDNARGLVLPGYKYLGPGNGLDKGEPVNAADAAALEHDKAYDQQLKAGDNPYLKYNHADAEFQERLKEDTSFGGNLGRAVFQAKKRLLEPLGLVEEAAKTAPGKKRPVEQSPQEPDSSAGIGKSGAQPAKKRLNFGQTGDTESVPDPQPIGEPPAAPSGVGSLTMASGGGAPVADNNEGADGVGSSSGNWHCDSQWLGDRVITTSTRTWALPTYNNHLYKQISNSTSGGSSNDNAYFGYSTPWGYFDFNRFHCHFSPRDWQRLINNNWGFRPKRLNFKLFNIQVKEVTDNNGVKTIANNLTSTVQVFTDSDYQLPYVLGSAHEGCLPPFPADVFMIPQYGYLTLNDGSQAVGRSSFYCLEYFPSQMLRTGNNFQFSYEFENVPFHSSYAHSQSLDRLMNPLIDQYLYYLSRTIILGTGTSQTLKFSVAGPSNMAVQGRNYIPGPSYRQQRVSTTVTQNNNSEFAWPGASSWALNGRNSLMNPGPAMASHKEGEDRFFPLSGSLIFGKQGTGRDNVDADKVMITNEEEIKTTNPVATESYGQVATNHQSAQTRTNPEAAQAQTGWVQNQGILPGMVWQDRDVYLQGPIWAKIPHTDGNFHPSPLMGGFGMKHPPPQILIKNTPVPADPPTAFNKDKLNSFITQYSTGQVSVEIEWELQKENSKRWNPEIQYTSNYYKSNNVEFAVNTEGVYSEPRPIGTRYLTRNL

SEQ ID NO: 9 - protein, 743 aa, synthetic construct
  REGION 1..743: note = source = /note="Description of Artificial Sequence: Synthetic polypeptide"
MAADGYLPDWLEDNLSEGIREWWALKPGAPQPKANQQHQDNARGLVLPGYKYLGPGNGLDKGEPVNAADAAALEHDKAYDQQLKAGDNPYLKYNHADAEFQERLKEDTSFGGNLGRAVFQAKKRLLEPLGLVEEAAKTAPGKKRPVEQSPQEPDSSAGIGKSGAQPAKKRLNFGQTGDTESVPDPQPIGEPPAAPSGVGSLTMASGGGAPVADNNEGADGVGSSSGNWHCDSQWLGDRVITTSTRTWALPTYNNHLYKQISNSTSGGSSNDNAYFGYSTPWGYFDFNRFHCHFSPRDWQRLINNNWGFRPKRLNFKLFNIQVKEVTDNNGVKTIANNLTSTVQVFTDSDYQLPYVLGSAHEGCLPPFPADVFMIPQYGYLTLNDGSQAVGRSSFYCLEYFPSQMLRTGNNFQFSYEFENVPFHSSYAHSQSLDRLMNPLIDQYLYYLSRTIILGTGTSQTLKFSVAGPSNMAVQGRNYIPGPSYRQQRVSTTVTQNNNSEFAWPGASSWALNGRNSLMNPGPAMASHKEGEDRFFPLSGSLIFGKQGTGRDNVDADKVMITNEEEIKTTNPVATESYGQVATNHQSAQNGGTSSSAQAQTGWVQNQGILPGMVWQDRDVYLQGPIWAKIPHTDGNFHPSPLMGGFGMKHPPPQILIKNTPVPADPPTAFNKDKLNSFITQYSTGQVSVEIEWELQKENSKRWNPEIQYTSNYYKSNNVEFAVNTEGVYSEPRPIGTRYLTRNL

SEQ ID NO: 10 - protein, 743 aa, synthetic construct
  REGION 1..743: note = source = /note="Description of Artificial Sequence: Synthetic polypeptide"
MAADGYLPDWLEDNLSEGIREWWALKPGAPQPKANQQHQDNARGLVLPGYKYLGPGNGLDKGEPVNAADAAALEHDKAYDQQLKAGDNPYLKYNHADAEFQERLKEDTSFGGNLGRAVFQAKKRLLEPLGLVEEAAKTAPGKKRPVEQSPQEPDSSAGIGKSGAQPAKKRLNFGQTGDTESVPDPQPIGEPPAAPSGVGSLTMASGGGAPVADNNEGADGVGSSSGNWHCDSQWLGDRVITTSTRTWALPTYNNHLYKQISNSTSGGSSNDNAYFGYSTPWGYFDFNRFHCHFSPRDWQRLINNNWGFRPKRLNFKLFNIQVKEVTDNNGVKTIANNLTSTVQVFTDSDYQLPYVLGSAHEGCLPPFPADVFMIPQYGYLTLNDGSQAVGRSSFYCLEYFPSQMLRTGNNFQFSYEFENVPFHSSYAHSQSLDRLMNPLIDQYLYYLSRTINGSGQNQQTLKFSVAGPSNMAVQGRNYIPGPSYRQQRVSTTVTQNNNSEFAWPGASSWALNGRNSLMNPGPAMASHKEGEDRFFPLSGSLIFGKQGTGRDNVDADKVMITNEEEIKTTNPVATESYGQVATNHQSAQQAVRTSLAQAQTGWVQNQGILPGMVWQDRDVYLQGPIWAKIPHTDGNFHPSPLMGGFGMKHPPPQILIKNTPVPADPPTAFNKDKLNSFITQYSTGQVSVEIEWELQKENSKRWNPEIQYTSNYYKSNNVEFAVNTEGVYSEPRPIGTRYLTRNL

SEQ ID NO: 11 - protein, 736 aa, synthetic construct
  REGION 1..736: note = source = /note="Description of Artificial Sequence: Synthetic polypeptide"
MAADGYLPDWLEDNLSEGIREWWALKPGAPQPKANQQHQDNARGLVLPGYKYLGPGNGLDKGEPVNAADAAALEHDKAYDQQLKAGDNPYLKYNHADAEFQERLKEDTSFGGNLGRAVFQAKKRLLEPLGLVEEAAKTAPGKKRPVEQSPQEPDSSAGIGKSGAQPAKKRLNFGQTGDTESVPDPQPIGEPPAAPSGVGSLTMASGGGAPVADNNEGADGVGSSSGNWHCDSQWLGDRVITTSTRTWALPTYNNHLYKQISNSTSGGSSNDNAYFGYSTPWGYFDFNRFHCHFSPRDWQRLINNNWGFRPKRLNFKLFNIQVKEVTDNNGVKTIANNLTSTVQVFTDSDYQLPYVLGSAHEGCLPPFPADVFMIPQYGYLTLNDGSQAVGRSSFYCLEYFPSQMLRTGNNFQFSYEFENVPFHSSYAHSQSLDRLMNPLIDQYLYYLSRTINGSGQNQQTLKFSVAGPSNMAVQGRNYIPGPSYRQQRVSTTVTQNNNSEFAWPGASSWALNGRNSLMNPGPAMASHKEGEDRFFPLSGSLIFGKQGTGRDNVDADKVMITNEEEIKTTNPVATESYGQVATNHQSAQAQAQTGWVQNQGILPGMVWQDRDVYLQGPIWAKIPHTDGNFHPSPLMGGFGMKHPPPQILIKNTPVPADPPTAFNKDKLNSFITQYSTGQVSVEIEWELQKENSKRWNPEIQYTSNYYKSNNVEFAVNTEGVYSEPRPIGTRYLTRNL

SEQ ID NO: 12 - DNA, 2211 bp, synthetic construct
  misc_feature 1..2211: note = source = /note="Description of Artificial Sequence: Synthetic polynucleotide"
  source 1..2211: mol_type = other DNA
atggctgccgatggttatcttccagattggctcgaggacaacctctctgagggcattcgcgagtggtgggacttgaaacctggagccccgaagcccaaagccaaccagcaaaagcaggacgacggccggggtctggtgcttcctggctacaagtacctcggacccttcaacggactcgacaagggggagcccgtcaacgcggcggacgcagcggccctcgagcacgacaaggcctacgaccagcagctcaaagcgggtgacaatccgtacctgcggtataaccacgccgacgccgagtttcaggagcgtctgcaagaagatacgtcttttgggggcaacctcgggcgagcagtcttccaggccaagaagcgggttctcgaacctctcggtctggttgaggaaggcgctaagacggctcctggaaagaaacgtccggtagagcagtcgccacaagagccagactcctcctcgggcatcggcaagacaggccagcagcccgctaaaaagagactcaattttggtcagactggcgactcagagtcagtccccgatccacaacctctcggagaacctccagcaacccccgctgctgtgggacctactacaatggcttcaggcggtggcgcaccaatggcagacaataacgaaggcgccgacggagtgggtaatgcctcaggaaattggcattgcgattccacatggctgggcgacagagtcatcaccaccagcacccgcacctgggccttgcccacctacaataaccacctctacaagcaaatctccagtgcttcaacgggggccagcaacgacaaccactacttcggctacagcaccccctgggggtattttgatttcaacagattccactgccacttttcaccacgtgactggcagcgactcatcaacaacaattggggattccggcccaagagactcaacttcaaactcttcaacatccaagtcaaggaggtcacgacgaatgatggcgtcacaaccatcgctaataaccttaccagcacggttcaagtcttctcggactcggagtaccagcttccgtacgtcctcggctctgcgcaccagggctgcctccctccgttcccggcggacgtgttcatgattccgcaatacggctacctgacgctcaacaatggcagccaagccgtgggacgttcatccttttactgcctggaatatttcccttctcagatgctgagaacgggcaacaactttaccttcagctacacctttgaggaagtgcctttccacagcagctacgcgcacagccagagcctggaccggctgatgaatcctctcatcgaccaatacctgtattacctgaacagaactcaaaatcagtccggaagtgcccaaaacaaggacttgctgtttagccgtgggtctccagctggcatgtctgttcagcccaaaaactggctacctggaccctgttatcggcagcagcgcgtttctaaaacaaaaacagacaacaacaacagcaattttacctggactggtgcttcaaaatataacctcaatgggcgtgaatccatcatcaaccctggcactgctatggcctcacacaaagacgacgaagacaagttctttcccatgagcggtgtcatgatttttggaaaagagagcgccggagcttcaaacactgcattggacaatgtcatgattacagacgaagaggaaattaaagccactaaccctgtggccaccgaaagatttgggaccgtggcagtcaatttccagagcagcagcacagaccctgcgaccggagatgtgcatgctatgggagcattacctggcatggtgtggcaagatagagacgtgtacctgcagggtcccatttgggccaaaattcctcacacagatggacactttcacccgtctcctcttatgggcggctttggactcaagaacccgcctcctcagatcctcatcaaaaacacgcctgttcctgcgaatcctccggcggagttttcagctacaaagtttgcttcattcatcacccaatactccacaggacaagtgagtgtggaaattgaatgggagctgcagaaagaaaacagcaagcgctggaatcccgaagtgcagtacacatccaattatgcaaaatctgccaacgttgattttactgtggacaacaatggactttatactgagcctcgccccattggcacccgttaccttacccgtcccctgtaa

SEQ ID NO: 13 - protein, 736 aa, Adeno-associated virus 1
MAADGYLPDWLEDNLSEGIREWWDLKPGAPKPKANQQKQDDGRGLVLPGYKYLGPFNGLDKGEPVNAADAAALEHDKAYDQQLKAGDNPYLRYNHADAEFQERLQEDTSFGGNLGRAVFQAKKRVLEPLGLVEEGAKTAPGKKRPVEQSPQEPDSSSGIGKTGQQPAKKRLNFGQTGDSESVPDPQPLGEPPATPAAVGPTTMASGGGAPMADNNEGADGVGNASGNWHCDSTWLGDRVITTSTRTWALPTYNNHLYKQISSASTGASNDNHYFGYSTPWGYFDFNRFHCHFSPRDWQRLINNNWGFRPKRLNFKLFNIQVKEVTTNDGVTTIANNLTSTVQVFSDSEYQLPYVLGSAHQGCLPPFPADVFMIPQYGYLTLNNGSQAVGRSSFYCLEYFPSQMLRTGNNFTFSYTFEEVPFHSSYAHSQSLDRLMNPLIDQYLYYLNRTQNQSGSAQNKDLLFSRGSPAGMSVQPKNWLPGPCYRQQRVSKTKTDNNNSNFTWTGASKYNLNGRESIINPGTAMASHKDDEDKFFPMSGVMIFGKESAGASNTALDNVMITDEEEIKATNPVATERFGTVAVNFQSSSTDPATGDVHAMGALPGMVWQDRDVYLQGPIWAKIPHTDGHFHPSPLMGGFGLKNPPPQILIKNTPVPANPPAEFSATKFASFITQYSTGQVSVEIEWELQKENSKRWNPEVQYTSNYAKSANVDFTVDNNGLYTEPRPIGTRYLTRPL

SEQ ID NO: 14 - DNA, 4718 bp, Adeno-associated virus 1
  source 1..4718: mol_type = unassigned DNA
ttgcccactccctctctgcgcgctcgctcgctcggtggggcctgcggaccaaaggtccgcagacggcagagctctgctctgccggccccaccgagcgagcgagcgcgcagagagggagtgggcaactccatcactaggggtaatcgcgaagcgcctcccacgctgccgcgtcagcgctgacgtaaattacgtcataggggagtggtcctgtattagctgtcacgtgagtgcttttgcgacattttgcgacaccacgtggccatttagggtatatatggccgagtgagcgagcaggatctccattttgaccgcgaaatttgaacgagcagcagccatgccgggcttctacgagatcgtgatcaaggtgccgagcgacctggacgagcacctgccgggcatttctgactcgtttgtgagctgggtggccgagaaggaatgggagctgcccccggattctgacatggatctgaatctgattgagcaggcacccctgaccgtggccgagaagctgcagcgcgacttcctggtccaatggcgccgcgtgagtaaggccccggaggccctcttctttgttcagttcgagaagggcgagtcctacttccacctccatattctggtggagaccacgggggtcaaatccatggtgctgggccgcttcctgagtcagattagggacaagctggtgcagaccatctaccgcgggatcgagccgaccctgcccaactggttcgcggtgaccaagacgcgtaatggcgccggaggggggaacaaggtggtggacgagtgctacatccccaactacctcctgcccaagactcagcccgagctgcagtgggcgtggactaacatggaggagtatataagcgcctgtttgaacctggccgagcgcaaacggctcgtggcgcagcacctgacccacgtcagccagacccaggagcagaacaaggagaatctgaaccccaattctgacgcgcctgtcatccggtcaaaaacctccgcgcgctacatggagctggtcgggtggctggtggaccggggcatcacctccgagaagcagtggatccaggaggaccaggcctcgtacatctccttcaacgccgcttccaactcgcggtcccagatcaaggccgctctggacaatgccggcaagatcatggcgctgaccaaatccgcgcccgactacctggtaggccccgctccgcccgcggacattaaaaccaaccgcatctaccgcatcctggagctgaacggctacgaacctgcctacgccggctccgtctttctcggctgggcccagaaaaggttcgggaagcgcaacaccatctggctgtttgggccggccaccacgggcaagaccaacatcgcggaagccatcgcccacgccgtgcccttctacggctgcgtcaactggaccaatgagaactttcccttcaatgattgcgtcgacaagatggtgatctggtgggaggagggcaagatgacggccaaggtcgtggagtccgccaaggccattctcggcggcagcaaggtgcgcgtggaccaaaagtgcaagtcgtccgcccagatcgaccccacccccgtgatcgtcacctccaacaccaacatgtgcgccgtgattgacgggaacagcaccaccttcgagcaccagcagccgttgcaggaccggatgttcaaatttgaactcacccgccgtctggagcatgactttggcaaggtgacaaagcaggaagtcaaagagttcttccgctgggcgcaggatcacgtgaccgaggtggcgcatgagttctacgtcagaaagggtggagccaacaaaagacccgcccccgatgacgcggataaaagcgagcccaagcgggcctgcccctcagtcgcggatccatcgacgtcagacgcggaaggagctccggtggactttgccgacaggtaccaaaacaaatgttctcgtcacgcgggcatgcttcagatgctgtttccctgcaagacatgcgagagaatgaatcagaatttcaacatttgcttcacgcacgggacgagagactgttcagagtgcttccccggcgtgtcagaatctcaaccggtcgtcagaaagaggacgtatcggaaactctgtgccattcatcatctgctggggcgggctcccgagattgcttgctcggcctgcgatctggtcaacgtggacctggatgactgtgtttctgagcaataaatgacttaaaccaggtatggctgccgatggttatcttccagattggctcgaggacaacctctctgagggcattcgcgagtggtgggacttgaaacctggagccccgaagcccaaagccaaccagcaaaagcaggacgacggccggggtctggtgcttcctggctacaagtacctcggacccttcaacggactcgacaagggggagcccgtcaacgcggcggacgcagcggccctcgagcacgacaaggcctacgaccagcagctcaaagcgggtgacaatccgtacctgcggtataaccacgccgacgccgagtttcaggagcgtctgcaagaagatacgtcttttgggggcaacctcgggcgagcagtcttccaggccaagaagcgggttctcgaacctctcggtctggttgaggaaggcgctaagacggctcctggaaagaaacgtccggtagagcagtcgccacaagagccagactcctcctcgggcatcggcaagacaggccagcagcccgctaaaaagagactcaattttggtcagactggcgactcagagtcagtccccgatccacaacctctcggagaacctccagcaacccccgctgctgtgggacctactacaatggcttcaggcggtggcgcaccaatggcagacaataacgaaggcgccgacggagtgggtaatgcctcaggaaattggcattgcgattccacatggctgggcgacagagtcatcaccaccagcacccgcacctgggccttgcccacctacaataaccacctctacaagcaaatctccagtgcttcaacgggggccagcaacgacaaccactacttcggctacagcaccccctgggggtattttgatttcaacagattccactgccacttttcaccacgtgactggcagcgactcatcaacaacaattggggattccggcccaagagactcaacttcaaactcttcaacatccaagtcaaggaggtcacgacgaatgatggcgtcacaaccatcgctaataaccttaccagcacggttcaagtcttctcggactcggagtaccagcttccgtacgtcctcggctctgcgcaccagggctgcctccctccgttcccggcggacgtgttcatgattccgcaatacggctacctgacgctcaacaatggcagccaagccgtgggacgttcatccttttactgcctggaatatttcccttctcagatgctgagaacgggcaacaactttaccttcagctacacctttgaggaagtgcctttccacagcagctacgcgcacagccagagcctggaccggctgatgaatcctctcatcgaccaatacctgtattacctgaacagaactcaaaatcagtccggaagtgcccaaaacaaggacttgctgtttagccgtgggtctccagctggcatgtctgttcagcccaaaaactggctacctggaccctgttatcggcagcagcgcgtttctaaaacaaaaacagacaacaacaacagcaattttacctggactggtgcttcaaaatataacctcaatgggcgtgaatccatcatcaaccctggcactgctatggcctcacacaaagacgacgaagacaagttctttcccatgagcggtgtcatgatttttggaaaagagagcgccggagcttcaaacactgcattggacaatgtcatgattacagacgaagaggaaattaaagccactaaccctgtggccaccgaaagatttgggaccgtggcagtcaatttccagagcagcagcacagaccctgcgaccggagatgtgcatgctatgggagcattacctggcatggtgtggcaagatagagacgtgtacctgcagggtcccatttgggccaaaattcctcacacagatggacactttcacccgtctcctcttatgggcggctttggactcaagaacccgcctcctcagatcctcatcaaaaacacgcctgttcctgcgaatcctccggcggagttttcagctacaaagtttgcttcattcatcacccaatactccacaggacaagtgagtgtggaaattgaatgggagctgcagaaagaaaacagcaagcgctggaatcccgaagtgcagtacacatccaattatgcaaaatctgccaacgttgattttactgtggacaacaatggactttatactgagcctcgccccattggcacccgttaccttacccgtcccctgtaattacgtgttaatcaataaaccggttgattcgtttcagttgaactttggtctcctgtccttcttatcttatcggttaccatggttatagcttacacattaactgcttggttgcgcttcgcgataaaagacttacgtcatcgggttacccctagtgatggagttgcccactccctctctgcgcgctcgctcgctcggtggggcctgcggaccaaaggtccgcagacggcagagctctgctctgccggccccaccgagcgagcgagcgcgcagagagggagtgggcaa

SEQ ID NO: 15 - DNA, 3131 bp, synthetic construct
  misc_feature 1..3131: note = source = /note="Description of Artificial Sequence: Synthetic polynucleotide"
  source 1..3131: mol_type = other DNA
gcggccgcgaattcgcccttggctgcgtcaactggaccaatgagaactttcccttcaatgattgcgtcgacaagatggtgatctggtgggaggagggcaagatgacggccaaggtcgtggagtccgccaaggccattctcggcggcagcaaggtgcgcgtggaccaaaagtgcaagtcgtccgcccagatcgaccccacccccgtgatcgtcacctccaacaccaacatgtgcgccgtgattgacgggaacagcaccaccttcgagcaccagcagcctctccaggaccggatgtttaagttcgaactcacccgccgtctggagcacgactttggcaaggtgacaaagcaggaagtcaaagagttcttccgctgggccagtgatcacgtgaccgaggtggcgcatgagttttacgtcagaaagggcggagccagcaaaagacccgcccccgatgacgcggataaaagcgagcccaagcgggcctgcccctcagtcgcggatccatcgacgtcagacgcggaaggagctccggtggactttgccgacaggtaccaaaacaaatgttctcgtcacgcgggcatgcttcagatgctgtttccctgcaaaacgtgcgagagaatgaatcggaatttcaacatttgcttcacacacggggtcagagactgctcagagtgtttccccggcgtgtcagaatctcaaccggtcgtcagaaagaggacgtatcggaaactccgtgcgattcatcatctgctggggcgggctcccgagattgcttgctcggcctgcgatctggtcaacgtggacctggatgactgtgtttctgagcaataaatgacttaaaccaggtatggctgccgatggttatcttccagattggctcgaggacaacctctctgagggcattcgcgagtggtgggcgctgaaacctggagccccgaagcccaaagccaaccagcaaaagcaggacgacggccggggtctggtgcttcctggctacaagtacctcggacccttcaacggactcgacaagggggagcccgtcaacgcggcggacgcagcggccctcgagcacgacaaggcttacgaccagcagctgcaggcgggtgacaatccgtacctgcggtataaccacgccgacgccgagtttcaggagcgtctgcaagaagatacgtcttttgggggcaacctcgggcgagcagtcttccaggccaagaagcgggttctcgaacctctcggtctggttgaggaaggcgctaagacggctcctggaaagaagagaccggtagagccatcaccccagcgttctccagactcctctacgggcatcggcaagaaaggccaacagcccgccagaaaaagactcaattttggtcagactggcgactcagagtcagttccagaccctcaacctctcggagaacctccagcagcgccctctggtgtgggacctaatacaatggctgcaggcggtggcgcaccaatggcagacaataacgaaggcgccgacggagtgggtagttcctcgggaaattggcattgcgattccacatggctgggcgacagagtcatcaccaccagcacccgaacctgggccctgcccacctacaacaaccacctctacaagcaaatctccaacgggacatcgggaggagccaccaacgacaacacctacttcggctacagcaccccctgggggtattttgactttaacagattccactgccacctttcaccacgtgactggcagcgactcatcaacaacaactggggattccgacccaagagactcagcttcaagctcttcaacatccaggtcaaggaggtcacgcagaatgaaggcaccaagaccatcgccaataacctcaccagcaccatccaggtgtttacggactcggagtaccagctgccgtacgttctcggctctgtccaccagggctgcctgcctccgttcccggcggacgtgttcatgattccccagtacggctacctaacactcaacaacggtagtcaggccgtgggacgctcctccttctactgcctggaatactttccttcgcagatgctgagaaccggcaacaacttccagtttacttacaccttcgaggacgtgcctttccacagcagctacgcccacagctagagcttggaccggctgatgaatcctctgattgaccagtacctgtactacttgtctcggactcaaacaacaggaggcacggcaaatacgcagactctgggcttcagccaaggtgggcctaatacaatggccaatcaggcaaagaactggctgccaggaccctgttaccgccaacaacgcgtctcaacgacaaccgggcaaaacaacaatagcaactttgcctggactgctgggaccaaataccatctgaatggaagaaattcattggctaatcctggcatcgctatggcaacacacaaagacgacgaggagcgtttttttcccagtaacgggatcctgatttttggcaaacaaaatgctgccagagacaatgcggattacagcgatgtcatgctcaccagcgaggaagaaatcaaaaccactaaccctgtggctacagaggaatacggtatcgtggcagataacttgcagcagcaaaacacggctcctcaaattggaactgtcaacagccagggggccttacccggtatggtctggcagaaccgggacgtgtacctgcagggtcccatctgggccaagattcctcacacggacggcaacttccacccgtctccgctgatgggcggctttggcctgaaacatcctccgcctcagatcctgatcaagaacacgcctgtacctgcggatcctccgaccaccttcaaccagtcaaagctgaactctttcatcacgcaatacagcaccggacaggtcagcgtggaaattgaatgggagctgcagaaggaaaacagcaagcgctggaaccccgagatccagtacacctccaactactacaaatctataagtgtggactttgctgttaatacagaaggcgtgtactctgaaccccgccccattggcacccgttacctcacccgtaatctgtaattgcctgttaatcaataaaccggttgattcgtttcagttgaactttggtctctgcgaagggcgaattc

SEQ ID NO: 16 - DNA, 255 bp, Adeno-associated virus 10
  source 1..255: mol_type = unassigned DNA
ggtaattcctccggaaattggcattgcgattccacatggctgggcgacagagtcatcaccaccagcacccgaacctgggtcctgcccacctacaacaaccacatctacaagcaaatctccagcgagacaggagccaccaacgacaaccactacttcggctacagcaccccctgggggtattttgactttaacagattccactgccacttttcaccacgtgactggcagcgactcatcaacaacaactggggattc

SEQ ID NO: 17 - protein, 738 aa, Adeno-associated virus 10
MAADGYLPDWLEDNLSEGIREWWDLKPGAPKPKANQQKQDDGRGLVLPGYKYLGPFNGLDKGEPVNAADAAALEHDKAYDQQLKAGDNPYLRYNHADAEFQERLQEDTSFGGNLGRAVFQAKKRVLEPLGLVEEAAKTAPGKKRPVEPSPQRSPDSSTGIGKKGQQPAKKRLNFGQTGESESVPDPQPIGEPPAGPSGLGSGTMAAGGGAPMADNNEGADGVGSSSGNWHCDSTWLGDRVITTSTRTWALPTYNNHLYKQISNGTSGGSTNDNTYFGYSTPWGYFDFNRFHCHFSPRDWQRLINNNWGFRPKRLSFKLFNIQVKEVTQNEGTKTIANNLTSTIQVFTDSEYQLPYVLGSAHQGCLPPFPADVFMIPQYGYLTLNNGSQAVGRSSFYCLEYFPSQMLRTGNNFEFSYTFEDVPFHSSYAHSQSLDRLMNPLIDQYLYYLSRTQSTGGTQGTQQLLFSQAGPANMSAQAKNWLPGPCYRQQRVSTTLSQNNNSNFAWTGATKYHLNGRDSLVNPGVAMATHKDDEERFFPSSGVLMFGKQGAGRDNVDYSSVMLTSEEEIKTTNPVATEQYGVVADNLQQANTGPIVGNVNSQGALPGMVWQNRDVYLQGPIWAKIPHTDGNFHPSPLMGGFGLKHPPPQILIKNTPVPADPPTTFSQAKLASFITQYSTGQVSVEIEWELQKENSKRWNPEIQYTSNYYKSTNVDFAVNTEGTYSEPRPIGTRYLTRNL

SEQ ID NO: 18 - protein, 738 aa, Adeno-associated virus 10
MAADGYLPDWLEDNLSEGIREWWDLKPGAPKPKANQQKQDDGRGLVLPGYKYLGPFNGLDKGEPVNAADAAALEHDKAYDQQLKAGDNPYLRYNHADAEFQERLQEDTSFGGNLGRAVFQAKKRVLEPLGLVEEGAKTAPGKKRPVEPSPQRSPDSSTGIGKKGQQPAKKRLNFGQTGDSESVPDPQPIGEPPAGPSGLGSGTMAAGGGAPMADNNEGADGVGSSSGNWHCDSTWLGDRVITTSTRTWALPTYNNHLYKQISNGTSGGSTNDNTYFGYSTPWGYFDFNRFHCHFSPRDWQRLINNNWGFRPKRLNFKLFNIQVKEVTQNEGTKTIANNLTSTIQVFTDSEYQLPYVLGSAHQGCLPPFPADVFMIPQYGYLTLNNGSQAVGRSSFYCLEYFPSQMLRTGNNFEFSYQFEDVPFHSSYAHSQSLDRLMNPLIDQYLYYLSRTQSTGGTAGTQQLLFSQAGPNNMSAQAKNWLPGPCYRQQRVSTTLSQNNNSNFAWTGATKYHLNGRDSLVNPGVAMATHKDDEERFFPSSGVLMFGKQGAGKDNVDYSSVMLTSEEEIKTTNPVATEQYGVVADNLQQQNAAPIVGAVNSQGALPGMVWQNRDVYLQGPIWAKIPHTDGNFHPSPLMGGFGLKHPPPQILIKNTPVPADPPTTFSQAKLASFITQYSTGQVSVEIEWELQKENSKRWNPEIQYTSNYYKSTNVDFAVNTDGTYSEPRPIGTRYLTRNL

SEQ ID NO: 19 - DNA, 258 bp, Adeno-associated virus 11
  source 1..258: mol_type = unassigned DNA
ggtaattcctccggaaattggcattgcgattccacatggctgggcgacagagtcatcaccaccagcacccgaacctgggccctgccaacctacaacaaccacctctacaaacaaatctccagcgcttcaacgggggccagcaacgacaaccactactttggctacagcaccccctgggggtattttgactttaacagattccactgccacttctcaccacgtgactggcagcgactcatcaacaacaactggggattc

SEQ ID NO: 20 - DNA, 255 bp, Adeno-associated virus 12
  source 1..255: mol_type = unassigned DNA
ggtaattcctccggaaattggcattgcgattccacatggctgggcgaccgagtcattaccaccagcacccggacttgggccctgcccacctacaacaaccacctctacaagcaaatctccagccaatcgggtgccaccaacgacaaccactacttcggctacagcaccccttgggggtattttgatttcaacagattccactgccatttctcaccacgtgactggcagcgactcatcaacaacaactggggattc

SEQ ID NO: 21 - DNA, 2208 bp, Adeno-associated virus 2
  source 1..2208: mol_type = unassigned DNA
atggctgccgatggttatcttccagattggctcgaggacactctctctgaaggaataagacagtggtggaagctcaaacctggcccaccaccaccaaagcccgcagagcggcataaggacgacagcaggggtcttgtgcttcctgggtacaagtacctcggacccttcaacggactcgacaagggagagccggtcaacgaggcagacgccgcggccctcgagcacgacaaagcctacgaccggcagctcgacagcggagacaacccgtacctcaagtacaaccacgccgacgcggagtttcaggagcgccttaaagaagatacgtcttttgggggcaacctcggacgagcagtcttccaggcgaaaaagagggttcttgaacctctgggcctggttgaggaacctgttaagacggctccgggaaaaaagaggccggtagagcactctcctgtggagccagactcctcctcgggaaccggaaaggcgggccagcagcctgcaagaaaaagattgaattttggtcagactggagacgcagactcagtacctgacccccagcctctcggacagccaccagcagccccctctggtctgggaactaatacgatggctacaggcagtggcgcaccaatggcagacaataacgagggcgccgacggagtgggtaattcctcgggaaattggcattgcgattccacatggatgggcgacagagtcatcaccaccagcacccgaacctgggccctgcccacctacaacaaccacctctacaaacaaatttccagccaatcaggagcctcgaacgacaatcactactttggctacagcaccccttgggggtattttgacttcaacagattccactgccacttttcaccacgtgactggcaaagactcatcaacaacaactggggattccgacccaagagactcaacttcaagctctttaacattcaagtcaaagaggtcacgcagaatgacggtacgacgacgattgccaataaccttaccagcacggttcaggtgtttactgactcggagtaccagctcccgtacgtcctcggctcggcgcatcaaggatgcctcccgccgttcccagcagacgtcttcatggtgccacagtatggatacctcaccctgaacaacgggagtcaggcagtaggacgctcttcattttactgcctggagtactttccttctcagatgctgcgtaccggaaacaactttaccttcagctacacttttgaggacgttcctttccacagcagctacgctcacagccagagtctggaccgtctcatgaatcctctcatcgaccagtacctgtattacttgagcagaacaaacactccaagtggaaccaccacgcagtcaaggcttcagttttctcaggccggagcgagtgacattcgggaccagtctaggaactggcttcctggaccctgttaccgccagcagcgagtatcaaagacatctgcggataacaacaacagtgaatactcgtggactggagctaccaagtaccacctcaatggcagagactctctggtgaatccgggcccggccatggcaagccacaaggacgatgaagaaaagttttttcctcagagcggggttctcatctttgggaagcaaggctcagagaaaacaaatgtggacattgaaaaggtcatgattacagacgaagaggaaatcaggacaaccaatcccgtggctacggagcagtatggttctgtatctaccaacctccagagaggcaacagacaagcagctaccgcagatgtcaacacacaaggcgttcttccaggcatggtctggcaggacagagatgtgtaccttcaggggcccatctgggcaaagattccacacacggacggacattttcacccctctcccctcatgggtggattcggacttaaacaccctcctccacagattctcatcaagaacaccccggtacctgcgaatccttcgaccaccttcagtgcggcaaagtttgcttccttcatcacacagtactccacgggacaggtcagcgtggagatcgagtgggagctgcagaaggaaaacagcaaacgctggaatcccgaaattcagtacacttccaactacaacaagtctgttaatgtggactttactgtggacactaatggcgtgtattcagagcctcgccccattggcaccagatacctgactcgtaatctgtaa

SEQ ID NO: 22 - protein, 735 aa, Adeno-associated virus 2 [sequence omitted]

SEQ ID NO: 23 - protein, 621 aa, Adeno-associated virus 2
MPGFYEIVIKVPSDLDGHLPGISDSFVNWVAEKEWELPPDSDMDLNLIEQAPLTVAEKLQRDFLTEWRRVSKAPEALFFVQFEKGESYFHMHVLVETTGVKSMVLGRFLSQIREKLIQRIYRGIEPTLPNWFAVTKTRNGAGGGNKVVDECYIPNYLLPKTQPELQWAWTNMEQYLSACLNLTERKRLVAQHLTHVSQTQEQNKENQNPNSDAPVIRSKTSARYMELVGWLVDKGITSEKQWIQEDQASYISFNAASNSRSQIKAALDNAGKIMSLTKTAPDYLVGQQPVEDISSNRIYKILELNGYDPQYAASVFLGWATKKFGKRNTIWLFGPATTGKTNIAEAIAHTVPFYGCVNWTNENFPFNDCVDKMVIWWEEGKMTAKVVESAKAILGGSKVRVDQKCKSSAQIDPTPVIVTSNTNMCAVIDGNSTTFEHQQPLQDRMFKFELTRRLDHDFGKVTKQEVKDFFRWAKDHVVEVEHEFYVKKGGAKKRPAPSDADISEPKRVRESVAQPSTSDAEASINYADRYQNKCSRHVGMNLMLFPCRQCERMNQNSNICFTHGQKDCLECFPVSESQPVSVVKKAYQKLCYIHHIMGKVPDACTACDLVNVDLDDCIFEQ

SEQ ID NO: 24 - DNA, 4675 bp, Adeno-associated virus 2
  source 1..4675: mol_type = unassigned DNA
ttggccactccctctctgcgcgctcgctcgctcactgaggccgggcgaccaaaggtcgcccgacgcccgggctttgcccgggcggcctcagtgagcgagcgagcgcgcagagagggagtggccaactccatcactaggggttcctggaggggtggagtcgtgacgtgaattacgtcatagggttagggaggtcctgtattagaggtcacgtgagtgttttgcgacattttgcgacaccatgtggtcacgctgggtatttaagcccgagtgagcacgcagggtctccattttgaagcgggaggtttgaacgcgcagccgccatgccggggttttacgagattgtgattaaggtccccagcgaccttgacgggcatctgcccggcatttctgacagctttgtgaactgggtggccgagaaggaatgggagttgccgccagattctgacatggatctgaatctgattgagcaggcacccctgaccgtggccgagaagctgcagcgcgactttctgacggaatggcgccgtgtgagtaaggccccggaggcccttttctttgtgcaatttgagaagggagagagctacttccacatgcacgtgctcgtggaaaccaccggggtgaaatccatggttttgggacgtttcctgagtcagattcgcgaaaaactgattcagagaatttaccgcgggatcgagccgactttgccaaactggttcgcggtcacaaagaccagaaatggcgccggaggcgggaacaaggtggtggatgagtgctacatccccaattacttgctccccaaaacccagcctgagctccagtgggcgtggactaatatggaacagtatttaagcgcctgtttgaatctcacggagcgtaaacggttggtggcgcagcatctgacgcacgtgtcgcagacgcaggagcagaacaaagagaatcagaatcccaattctgatgcgccggtgatcagatcaaaaacttcagccaggtacatggagctggtcgggtggctcgtggacaaggggattacctcggagaagcagtggatccaggaggaccaggcctcatacatctccttcaatgcggcctccaactcgcggtcccaaatcaaggctgccttggacaatgcgggaaagattatgagcctgactaaaaccgcccccgactacctggtgggccagcagcccgtggaggacatttccagcaatcggatttataaaattttggaactaaacgggtacgatccccaatatgcggcttccgtctttctgggatgggccacgaaaaagttcggcaagaggaacaccatctggctgtttgggcctgcaactaccgggaagaccaacatcgcggaggccatagcccacactgtgcccttctacgggtgcgtaaactggaccaatgagaactttcccttcaacgactgtgtcgacaagatggtgatctggtgggaggaggggaagatgaccgccaaggtcgtggagtcggccaaagccattctcggaggaagcaaggtgcgcgtggaccagaaatgcaagtcctcggcccagatagacccgactcccgtgatcgtcacctccaacaccaacatgtgcgccgtgattgacgggaactcaacgaccttcgaacaccagcagccgttgcaagaccggatgttcaaatttgaactcacccgccgtctggatcatgactttgggaaggtcaccaagcaggaagtcaaagactttttccggtgggcaaaggatcacgtggttgaggtggagcatgaattctacgtcaaaaagggtggagccaagaaaagacccgcccccagtgacgcagatataagtgagcccaaacgggtgcgcgagtcagttgcgcagccatcgacgtcagacgcggaagcttcgatcaactacgcagacaggtaccaaaacaaatgttctcgtcacgtgggcatgaatctgatgctgtttccctgcagacaatgcgagagaatgaatcagaattcaaatatctgcttcactcacggacagaaagactgtttagagtgctttcccgtgtcagaatctcaacccgtttctgtcgtcaaaaaggcgtatcagaaactgtgctacattcatcatatcatgggaaaggtgccagacgcttgcactgcctgcgatctggtcaatgtggatttggatgactgcatctttgaacaataaatgatttaaatcaggtatggctgccgatggttatcttccagattggctcgaggacactctctctgaaggaataagacagtggtggaagctcaaacctggcccaccaccaccaaagcccgcagagcggcataaggacgacagcaggggtcttgtgcttcctgggtacaagtacctcggacccttcaacggactcgacaagggagagccggtcaacgaggcagacgccgcggccctcgagcacgtacaaagcctacgaccggcagctcgacagcggagacaacccgtacctcaagtacaaccacgccgacgcggagtttcaggagcgccttaaagaagatacgtcttttgggggcaacctcggacgagcagtcttccaggcgaaaaagagggttcttgaacctctgggcctggttgaggaacctgttaagacggctccgggaaaaaagaggccggtagagcactctcctgtggagccagactcctcctcgggaaccggaaaggcgggccagcagcctgcaagaaaaagattgaattttggtcagactggagacgcagactcagtacctgacccccagcctctcggacagccaccagcagccccctctggtctgggaactaatacgatggctacaggcagtggcgcaccaatggcagacaataacgagggcgccgacggagtgggtaattcctccggaaattggcattgcgattccacatggatgggcgacagagtcatcaccaccagcacccgaacctgggccctgcccacctacaacaaccacctctacaaacaaatttccagccaatcaggagcctcgaacgacaatcactactttggctacagcaccccttgggggtattttgacttcaacagattccactgccacttttcaccacgtgactggcaaagactcatcaacaacaactggggattccgacccaagagactcaacttcaagctctttaacattcaagtcaaagaggtcacgcagaatgacggtacgacgacgattgccaataaccttaccagcacggttcaggtgtttactgactcggagtaccagctcccgtacgtcctcggctcggcgcatcaaggatgcctcccgccgttcccagcagacgtcttcatggtgccacagtatggatacctcaccctgaacaacgggagtcaggcagtaggacgctcttcattttactgcctggagtactttccttctcagatgctgcgtaccggaaacaactttaccttcagctacacttttgaggacgttcctttccacagcagctacgctcacagccagagtctggaccgtctcatgaatcctctcatcgaccagtacctgtattacttgagcagaacaaacactccaagtggaaccaccacgcagtcaaggcttcagttttctcaggccggagcgagtgacattcgggaccagtctaggaactggcttcctggaccctgttaccgccagcagcgagtatcaaagacatctgcggataacaacaacagtgaatactcgtggactggagctaccaagtaccacctcaatggcagagactctctggtgaatccggccatggcaagccacaaggacgatgaagaaaagttttttcctcagagcggggttctcatctttgggaagcaaggctcagagaaaacaaatgtgaacattgaaaaggtcatgattacagacgaagaggaaatcggaacaaccaatcccgtggctacggagcagtatggttctgtatctaccaacctccagagaggcaacagacaagcagctaccgcagatgtcaacacacaaggcgttcttccaggcatggtctggcaggacagagatgtgtaccttcaggggcccatctgggcaaagattccacacacggacggacattttcacccctctcccctcatgggtggattcggacttaaacaccctcctccacagattctcatcaagaacaccccggtacctgcgaatccttcgaccaccttcagtgcggcaaagtttgcttccttcatcacacagtactccacgggacacggtcagcgtggagatcgagtgggagctgcagaaggaaaacagcaaacgctggaatcccgaaattcagtacacttccaactacaacaagtctgttaatcgtggacttaccgtggatactaatggcgtgtattcagagcctcgccccattggcaccagatacctgactcgtaatctgtaattgcttgttaatcaataaaccgtttaattcgtttcagttgaactttggtctctgcgtatttctttcttatctagtttccatggctacgtagataagtagcatggcgggttaatcattaactacaaggaacccctagtgatggagttggccactccctctctgcgcgctcgctcgctcactgaggccgggcgaccaaaggtcgcccgacgcccgggctttgcccgggcggcctcagtgagcgagcgagcgcgcagagagggagtggccaa

SEQ ID NO: 25 - DNA, 4679 bp, Adeno-associated virus 2
  source 1..4679: mol_type = unassigned DNA
ttggccactccctctctgcgcgctcgctcgctcactgaggccgggcgaccaaaggtcgcccgacgcccgggctttgcccgggcggcctcagtgagcgagcgagcgcgcagagagggagtggccaactccatcactaggggttcctggaggggtggagtcgtgacgtgaattacgtcatagggttagggaggtcctgtattagaggtcacgtgagtgttttgcgacattttgcgacaccatgtggtcacgctgggtatttaagcccgagtgagcacgcagggtctccattttgaagcgggaggtttgaacgcgcagccgccatgccggggttttacgagattgtgattaaggtccccagcgaccttgacgggcatctgcccggcatttctgacagctttgtgaactgggtggccgagaaggaatgggagttgccgccagattctgacatggatctgaatctgattgagcaggcacccctgaccgtggccgagaagctgcagcgcgactttctgacggaatggcgccgtgtgagtaaggccccggaggcccttttctttgtgcaatttgagaagggagagagctacttccacatgcacgtgctcgtggaaaccaccggggtgaaatccatggttttgggacgtttcctgagtcagattcgcgaaaaactgattcagagaatttaccgcgggatcgagccgactttgccaaactggttcgcggtcacaaagaccagaaatggcgccggaggcgggaacaaggtggtggatgagtgctacatccccaattacttgctccccaaaacccagcctgagctccagtgggcgtggactaatatggaacagtatttaagcgcctgtttgaatctcacggagcgtaaacggttggtggcgcagcatctgacgcacgtgtcgcagacgcaggagcagaacaaagagaatcagaatcccaattctgatgcgccggtgatcagatcaaaaacttcagccaggtacatggagctggtcgggtggctcgtggacaaggggattacctcggagaagcagtggatccaggaggaccaggcctcatacatctccttcaatgcggcctccaactcgcggtcccaaatcaaggctgccttggacaatgcgggaaagattatgagcctgactaaaaccgcccccgactacctggtgggccagcagcccgtggaggacatttccagcaatcggatttataaaattttggaactaaacgggtacgatccccaatatgcggcttccgtctttctgggatgggccacgaaaaagttcggcaagaggaacaccatctggctgtttgggcctgcaactaccgggaagaccaacatcgcggaggccatagcccacactgtgcccttctacgggtgcgtaaactggaccaatgagaactttcccttcaacgactgtgtcgacaagatggtgatctggtgggaggaggggaagatgaccgccaaggtcgtggagtcggccaaagccattctcggaggaagcaaggtgcgcgtggaccagaaatgcaagtcctcggcccagatagacccgactcccgtgatcgtcacctccaacaccaacatgtgcgccgtgattgacgggaactcaacgaccttcgaacaccagcagccgttgcaagaccggatgttcaaatttgaactcacccgccgtctggatcatgactttgggaaggtcaccaagcaggaagtcaaagactttttccggtgggcaaaggatcacgtggttgaggtggagcatgaattctacgtcaaaaagggtggagccaagaaaagacccgcccccagtgacgcagatataagtgagcccaaacgggtgcgcgagtcagttgcgcagccatcgacgtcagacgcggaagcttcgatcaactacgcagacaggtaccaaaacaaatgttctcgtcacgtgggcatgaatctgatgctgtttccctgcagacaatgcgagagaatgaatcagaattcaaatatctgcttcactcacggacagaaagactgtttagagtgctttcccgtgtcagaatctcaacccgtttctgtcgtcaaaaaggcgtatcagaaactgtgctacattcatcatatcatgggaaaggtgccagacgcttgcactgcctgcgatctggtcaatgtggatttggatgactgcatctttgaacaataaatgatttaaatcaggtatggctgccgatggttatcttccagattggctcgaggacactctctctgaaggaataagacagtggtggaagctcaaacctggcccaccaccaccaaagcccgcagagcggcataaggacgacagcaggggtcttgtgcttcctgggtacaagtacctcggacccttcaacggactcgacaagggagagccggtcaacgaggcagacgccgcggccctcgagcacgacaaagcctacgaccggcagctcgacagcggagacaacccgtacctcaagtacaaccacgccgacgcggagtttcaggagcgccttaaagaagatacgtcttttgggggcaacctcggacgagcagtcttccaggcgaaaaagagggttcttgaacctctgggcctggttgaggaacctgttaagacggctccgggaaaaaagaggccggtagagcactctcctgtggagccagactcctcctcgggaaccggaaaggcgggccagcagcctgcaagaaaaagattgaattttggtcagactggagacgcagactcagtacctgacccccagcctctcggacagccaccagcagccccctctggtctgggaactaatacgatggctacaggcagtggcgcaccaatggcagacaataacgagggcgccgacggagtgggtaattcctccggaaattggcattgcgattccacatggatgggcgacagagtcatcaccaccagcacccgaacctgggccctgcccacctacaacaaccacctctacaaacaaatttccagccaatcaggagcctcgaacgacaatcactactttggctacagcaccccttgggggtattttgacttcaacagattccactgccacttttcaccacgtgactggcaaagactcatcaacaacaactggggattccgacccaagagactcaacttcaagctctttaacattcaagtcaaagaggtcacgcagaatgacggtacgacgacgattgccaataaccttaccagcacggttcaggtgtttactgactcggagtaccagctcccgtacgtcctcggctcggcgcatcaaggatgcctcccgccgttcccagcagacgtcttcatggtgccacagtatggatacctcaccctgaacaacgggagtcaggcagtaggacgctcttcattttactgcctggagtactttccttctcagatgctgcgtaccggaaacaactttaccttcagctacacttttgaggacgttcctttccacagcagctacgctcacagccagagtctggaccgtctcatgaatcctctcatcgaccagtacctgtattacttgagcagaacaaacactccaagtggaaccaccacgcagtcaaggcttcagttttctcaggccggagcgagtgacattcgggaccagtctaggaactggcttcctggaccctgttaccgccagcagcgagtatcaaagacatctgcggataacaacaacagtgaatactcgtggactggagctaccaagtaccacctcaatggcagagactctctggtgaatccgggcccggccatggcaagccacaaggacgatgaagaaaagttttttcctcagagcggggttctcatctttgggaagcaaggctcagagaaaacaaatgtggacattgaaaaggtcatgattacagacgaagaggaaatcaggacaaccaatcccgtggctacggagcagtatggttctgtatctaccaacctccagagaggcaacagacaagcagctaccgcagatgtcaacacacaaggcgttcttccaggcatggtctggcaggacagagatgtgtaccttcaggggcccatctgggcaaagattccacacacggacggacattttcacccctctcccctcatgggtggattcggacttaaacaccctcctccacagattctcatcaagaacaccccggtacctgcgaatccttcgaccaccttcagtgcggcaaagtttgcttccttcatcacacagtactccacgggacaggtcagcgtggagatcgagtgggagctgcagaaggaaaacagcaaacgctggaatcccgaaattcagtacacttccaactacaacaagtctgttaatgtggactttactgtggacactaatggcgtgtattcagagcctcgccccattggcaccagatacctgactcgtaatctgtaattgcttgttaatcaataaaccgtttaattcgtttcagttgaactttggtctctgcgtatttctttcttatctagtttccatggctacgtagataagtagcatggcgggttaatcattaactacaaggaacccctagtgatggagttggccactccctctctgcgcgctcgctcgctcactgaggccgggcgaccaaaggtcgcccgacgcccgggctttgcccgggcggcctcagtgagcgagcgagcgcgcagagagggagtggccaa

SEQ ID NO: 26 - protein, 725 aa, Adeno-associated virus 5
MAADGYLPDWLEDTLSEGIRQWWKLKPGPPPPKPAERHKDDSRGLVLPGYKYLGPFNGLDKGEPVNEADAAALEHDKAYDRQLDSGDNPYLKYNHADAEFQERLKEDTSFGGNLGRAVFQAKKRVLEPFGLVEEGAKTAPTGKRIDDHFPKRKKARTEEDSKPSTSSDAEAGPSGSQQLQIPAQPASSLGADTMSAGGGGPLGDNNQGADGVGNASGDWHCDSTWMGDRVVTKSTRTWVLPSYNNHQYREIKSGSVDGSNANAYFGYSTPWGYFDFNRFHSHWSPRDWQRLINNYWGFRPRSLRVKIFNIQVKEVTVQDSTTTIANNLTSTVQVFTDDDYQLPYVVGNGTEGCLPAFPPQVFTLPQYGYATLNRDNTENPTERSSFFCLEYFPSKMLRTGNNFEFTYNFEEVPFHSSFAPSQNLFKLANPLVDQYLYRFVSTNNTGGVQFNKNLAGRYANTYKNWFPGPMGRTQGWNLGSGVNRASVSAFATTNRMELEGASYQVPPQPNGMTNNLQGSNTYALENTMIFNSQPANPGTTATYLEGNMLITSESETQPVNRVAYNVGGQMATNNQSSTTAPTTGTYNLQEIVPGSVWMERDVYLQGPIWAKIPETGAHFHPSPAMGGFGLKHPPPMMLIKNTPVPGNITSFSDVPVSSFITQYSTGQVTVEMEWELKKENSKRWNPEIQYTNNYNDPQFVDFAPDSTGEYRTTRPIGTRYLTRPL

SEQ ID NO: 27 - protein, 644 aa, synthetic construct
  VARIANT 434: note = MOD_RES - Any amino acid
  REGION 1..644: note = source = /note="Description of Artificial Sequence: Synthetic polypeptide"
KAYDQQLKAGDNPYLRYNHADAEFQERLQEDTSFGGNLGRAVFQAKKRVLEPLGLVETPAKTAPGKKRPVDSPDSTSGIGKKGQQPAKKRLNFGQTGDSESVPDPQPIGEPPAGPSGLGSGTMAAGGGAPMADNNEGADGVGNASGNWHCDSTWLGDRVITTSTRTWALPTYNNHLYKQISSQSAGSTNDNVYFGYSTPWGYFDFNRFHCHFSPRDWQRLINNNWGFRPKKLNFKLFNIQVKEVTTNDGVTTIANNLTSTVQVFSDSEYQLPYVLGSAHQGCLPPFPADVFMIPQYGYLTLNNGSQSVGRSSFYCLEYFPSQMLRTGNNFTFSYTFEDVPFHSSYAHSQSLDRLMNPLIDQYLYYLARTQSNAGGTAGNRELQFYQGGPTTMAEQAKNWLPGPCFRQQRVSKTLDQNNNSNFAWTGATKYHLNXRNSLVNPGVAMATHKDDEERFFPSSGVLIFGKTGAANKTTLENVLMTNEEEIRPTNPVATEEYGIVSSNLQAASTAAQTQVVNNQGALPGMVWQNRDVYLQGPIWAKIPHTDGNFHPSPLMGGFGLKHPPPQILIKNTPVPANPPEVFTPAKFASFITQYSTGQVSVEIEWELQKENSKRWNPEIQYTSNFDKQTGVDFAVDSQGVYSEP

SEQ ID NO: 28 - DNA, 1933 bp, synthetic construct
  misc_feature 1..1933: note = source = /note="Description of Artificial Sequence: Synthetic polynucleotide"
  source 1..1933: mol_type = other DNA
caaggcctacgaccagcagctcaaagcgggtgacaatccgtacctgcggtataaccacgccgacgccgagtttcaggagtgtcttcaagaagatacgtcttttgggggcaacctcgggcgagcagtcttccaggccaaaaagcgggttctcgaacctcttggtctggttgagacgccagctaagacggcacctggaaagaagcgaccggtagactcgccagactccacctcgggcatcggcaagaaaggccagcagcccgcgaaaaagagactcaactttgggcagactggcgactcagagtcagtccccgaccctcaaccaatcggagaaccaccagcaggcccctctggtctgggatctggtacaatggttgcaggcggtggcgcaccaatggctgacaataacgagggcgccgacggagtgggtaatgcctcaggaaattggcattgcgattccacatggctgggcgacagagtcatcaccaccagcacccgaacctgggccctgcccacctacaacaaccacctctacaagcaaatctccagtcagtcagcagggagcaccaacgataacgtctatttcggctacagcaccccctgggggtattttgacttcaacagattccattgccacttctcaccacgtgactggcagcgacttatcaacaacaactggggattccggcccaagaagctcaacttcaagctcttcaacatccaggtcaaggaggtcacgacgaatgacggtgtcacaaccatcgctaataaccttaccagcacggttcaggtcttttcggactcggaatatcaactgccgtacgtcctcggctccgcgcaccagggctgcctgcctccgttcccggcagacgtgttcatgattccgcagtacggatacctgactctgaacaatggcagccaatcggtaggccgttcctccttctactgcctggagtactttccttctcagatgctgagaacgggcaacaacttcacctttagctacaccttcgaggacgtgcctttccacagcagctacgcgcacagccagagtctggaccggctgatgaatcccctcatcgaccagtacctgtactacttggccagaacacagagcaacgcaggaggtactgctggcaatcgggaactgcagttttatcagggcggacctaccaccatggccgaacaagcaaagaactggctgcccggaccttgcttccggcaacagagagtatccaagacgctggatcaaaataacaacagcaactttgcctggactggtgccacaaaataccatttaaatggaagaaattcattggttaatcccggtgtcgccatggcaacccacaaggacgacgaggaacgcttctccccttcgagcggagttctaatttttggcaaaactggagcagctaataaaactacattagaaaacgtgctcatgacaaatgaagaagaaattcgtcctaccaacccggtagctaccgaggaatacgggattgtaagcagcaacttgcaggcggctagcaccgcagcccagacacaagttgttaacaaccagggagccttacctggcatggtctggcagaaccgggacgtgtacctgcaaggtcccatttgggccaagattcctcacacggacggcaactttcacccgtctcctctaatgggtggctttggactgaaacacccgcctccccagatcctgatcaaaaacacgccggtacctgctaatcctccagaagtgtttactcctgccaagtttgcttccttcatcacgcagtacagcaccgggcaagtcagcgttgagatcgagtgggagctgcagaaagagaacagcaagcgctggaacccagagattcagtacacctccaactttgacaaacagactggagtggactttgctgttgacagccagggtgtttactctgagcct

SEQ ID NO: 29 - protein, 644 aa, synthetic construct
  REGION 1..644: note = source = /note="Description of Artificial Sequence: Synthetic polypeptide"
KAYDQQLKAGDNPYLRYNHADAEFQECLQEDTSFGGNLGRAVFQAKKRVLEPLGLVETPAKTAPGKKRPVDSPDSTSGIGKKGQQPAKKRLNFGQTGDSESVPDPQPIGEPPAGPSGLGSGTMVAGGGAPMADNNEGADGVGNASGNWHCDSTWLGDRVITTSTRTWALPTYNNHLYKQISSQSAGSTNDNVYFGYSTPWGYFDFNRFHCHFSPRDWQRLINNNWGFRPKKLNFKLFNIQVKEVTTNDGVTTIANNLTSTVQVFSDSEYQLPYVLGSAHQGCLPPFPADVFMIPQYGYLTLNNGSQSVGRSSFYCLEYFPSQMLRTGNNFTFSYTFEDVPFHSSYAHSQSLDRLMNPLIDQYLYYLARTQSNAGGTAGNRELQFYQGGPTTMAEQAKNWLPGPCFRQQRVSKTLDQNNNSNFAWTGATKYHLNGRNSLVNPGVAMATHKDDEERFSPSSGVLIFGKTGAANKTTLENVLMTNEEEIRPTNPVATEEYGIVSSNLQAASTAAQTQVVNNQGALPGMVWQNRDVYLQGPIWAKIPHTDGNFHPSPLMGGFGLKHPPPQILIKNTPVPANPPEVFTPAKFASFITQYSTGQVSVEIEWELQKENSKRWNPEIQYTSNFDKQTGVDFAVDSQGVYSEP

SEQ ID NO: 30 - DNA, 1933 bp, synthetic construct
  misc_feature 1..1933: note = source = /note="Description of Artificial Sequence: Synthetic polynucleotide"
  source 1..1933: mol_type = other DNA
caaggcctacgaccagcagctcaaagcgggtgacaatccgtacctgcggtataaccacgccgacgccgagtttcaggagcgtcttcaagaagatacgtcttttgggggcaacctcgggcgagcagtcttccaggccaaaaagcgggttctcgaacctcttggtctggttgagacgccagctaagacggcacctggaaagaagcgaccggtagactcgccagactccacctcgggcatcggcaagaaaggccagcagcccgcgaaaaagagactcaactttgggcagactggcgactcagagccagtccccgaccctcaaccaatcggagaaccaccagcaggcccctctggtctgggatctggtacaatggctgcaggcggtggcgcaccaatggctgacaataacgagggcgccgacggagtgggtaatgcctcaggaaattggcattgcgattccacacggctgggcgacagagtcatcaccaccagcacccgaacctgggccctgcccacctacaacaaccacctctacaagcaaatctccagtcagtcagcagggagcaccaacgataacgtctatttcggctacagcaccccctgggggtattttgacttcaacagattccattgccacttctcaccacgtgactggcagcgacttatcaacaacaactggggattccggcccaagaagctcaacttcaagctcttcaacatccaggtcaaggaggtcacgacgaatgacggcgtcacaaccatcgctaataaccttaccagcacggttcaggtcttttcggactcggaatatcaactgccgtacgtcctcggctccgcgcaccagggctgcctgcctccgttcccggcagacgtgttcatgattccgcagtacggatacctgactctgaacaatggcagccaatcggtaggccgttcctccttctactgcctggagtactttccttctcagatgctgagaacgggcaacaacttcacctttagctacaccttcgaggacgtgcctttccacagcagctacgcgcacagccagagtctgggccggctgatgaatcccctcatcgaccagtacctgtactacttggccagaacacagagcaacgcaggaggtactgctggcaatcgggaactgcagttttatcagggcggacctaccaccatggccgaacaagcaaagaactggctgcccggaccttgcttccggcaacagagagtatccaagacgctggatcaaaataacaacagcaactttgcctggactggtgccacaaaataccatttaaatggaagaaattcattggttaatcccggtgtcgccatggcaacccacaaggacgacgaggaacgcttcttcccttcgagcggagttctaatttttggcaaaactggagcagctaataaaactacattagaaaacgtgctcatgacaaatgaagaagaaattcgtcctaccaacccggtagctaccgaggaatacgggattgtaagcagcaacttgcaggcggctagcaccgcagcccagacacaagttgttaacaaccagggagccttacctggcatggtctggcagaaccgggacgtgtacctgcaaggtcccatttgggccaagattcctcacacggacggcaactttcacccgtctcctctaatgggtggctttggactgaaacacccgcctccccagatcctgatcaaaaacacaccggtacctgctaatcctccagaagtgtttactcctgccaagtttgcttccttcatcacgcagtacagcaccgggcaagtcagcgttgagatcgaatgggagctgcagaaagagaacagcaagcgctggaacccagagattcagtacacctccaactttgacaaacagactggagtggactttgctgttgacagccagggtgtttactctgagcct

SEQ ID NO: 31 - protein, 644 aa, synthetic construct
  REGION 1..644: note = source = /note="Description of Artificial Sequence: Synthetic polypeptide"
KAYDQQLKAGDNPYLRYNHADAEFQERLQEDTSFGGNLGRAVFQAKKRVLEPLGLVETPAKTAPGKKRPVDSPDSTSGIGKKGQQPAKKRLNFGQTGDSEPVPDPQPIGEPPAGPSGLGSGTMAAGGGAPMADNNEGADGVGNASGNWHCDSTRLGDRVITTSTRTWALPTYNNHLYKQISSQSAGSTNDNVYFGYSTPWGYFDFNRFHCHFSPRDWQRLINNNWGFRPKKLNFKLFNIQVKEVTTNDGVTTIANNLTSTVQVFSDSEYQLPYVLGSAHQGCLPPFPADVFMIPQYGYLTLNNGSQSVGRSSFYCLEYFPSQMLRTGNNFTFSYTFEDVPFHSSYAHSQSLGRLMNPLIDQYLYYLARTQSNAGGTAGNRELQFYQGGPTTMAEQAKNWLPGPCFRQQRVSKTLDQNNNSNFAWTGATKYHLNGRNSLVNPGVAMATHKDDEERFFPSSGVLIFGKTGAANKTTLENVLMTNEEEIRPTNPVATEEYGIVSSNLQAASTAAQTQVVNNQGALPGMVWQNRDVYLQGPIWAKIPHTDGNFHPSPLMGGFGLKHPPPQILIKNTPVPANPPEVFTPAKFASFITQYSTGQVSVEIEWELQKENSKRWNPEIQYTSNFDKQTGVDFAVDSQGVYSEP

SEQ ID NO: 32 - DNA, 1933 bp, synthetic construct; identical to SEQ ID NO: 30
  misc_feature 1..1933: note = source = /note="Description of Artificial Sequence: Synthetic polynucleotide"
  source 1..1933: mol_type = other DNA

SEQ ID NO: 33 - protein, 644 aa, synthetic construct; identical to SEQ ID NO: 31
  REGION 1..644: note = source = /note="Description of Artificial Sequence: Synthetic polypeptide"

SEQ ID NO: 34 - DNA, 1933 bp, synthetic construct
  misc_feature 1..1933: note = source = /note="Description of Artificial Sequence: Synthetic polynucleotide"
  source 1..1933: mol_type = other DNA
caaggcctacgaccagcagctcaaagcgggtgacaatccgtacctgcggtataaccacgccgacgccgagtttcaggagcgtcttcaagaagatacgtcttttgggggcaacctcgggcgagcagtcttccaggccaaaaagcgggttctcgaacctcttggtctggttgagacgccagctaagacggcacctggaaagaagcgaccggtagactcgccagactccacctcgggcatcggcaagaaaggccagcagcccgcgaaaaagagactcaactttgggcagactggcgactcagagtcagtccccgaccctcaaccaatcggagaaccaccagcaggcccctctggtctgggatctggtacaatggctgcaggcggtggcgcaccaatggctgacaatagcgagggcgccgacggagtgggtaatgcctcaggaaattggcattgcgattccacatggctgggcgacagagtcatcaccaccagcacccgaacctgggccctgcccacctacaacaaccacctctacaagcaaatctccagtcagtcagcagggagcaccaacgataacgtctatttcggctacagcaccccctgggggtattttgacttcaacagattccattgccacttctcaccacgtgactggcagcgacttatcaacaacaactggggattccggcccaagaagctcaacttcaagctcttcaacatccaggtcaaggaggtcacgacgaatgacggtgtcacaaccatcgctaataaccttaccagcacggttcaggtcttttcggactcggaatatcaactgccgtacgtcctcggctccgcgcaccagggctgcctgcctccgttcccggcagacgtgttcatgattccgcagtacggatacctgactctgaacaatggcagccaatcggtaggccgttcctccttctactgcctggagtactttccttctcagatgctgagaacgggcaacaacttcacctttagctacaccttcgaggacgtgcctttccacagcagctacgcgcacagccagagtctggaccggctgatgaatcccctcatcgaccagtacctgtactacttggccagaacacagagcaacgcaggaggtactgctggcaatcgggaactgcagttttatcagggcggacctaccaccatggccgaacaagcaaagaactggctgcccggaccttgcttccggcaacagagagtatccaagacgctggatcaaaataacaacagcaactttgcctggactggtgccacaaaataccatttaaatggaagaaattcattggttaatcccggtgtcgccatggcaacccacaaggacgacgaggaacgcttcttcccttcgagcggagttctaatttttggcaaaactggagcagctaataaaactacattagaaaacgtgctcatgacaaatgaagaagaaattcgtcctaccaacccggtagctaccgaggaatacgggattgtaagcagcaacttgcaggcggctagcaccgcagcccagacacaagttgttaacaaccagggagccttacctggcatggtctggcagaaccgggacgtgtacctgcaaggtcccatttgggccaagattcctcacacggacggcaactttcacccgtctcctctaatgggtggctttggactgaaacacccgcctccccagatcctgatcaaaaacacaccggtacctgctaatcctccagaagtgtttactcctgccaagcttgcttccttcatcacgcagtacagcaccgggcaagtcagcgttgagatcgagtgggagctgcagaaagagaacagcaagcgctggaacccagagattcagtacacctccaactttgacaaacagactggagtggactttgctgttgacagccagggtgtttactctgagcct

SEQ ID NO: 35 - protein, 644 aa, synthetic construct
  REGION 1..644: note = source = /note="Description of Artificial Sequence: Synthetic polypeptide"
KAYDQQLKAGDNPYLRYNHADAEFQERLQEDTSFGGNLGRAVFQAKKRVLEPLGLVETPAKTAPGKKRPVDSPDSTSGIGKKGQQPAKKRLNFGQTGDSESVPDPQPIGEPPAGPSGLGSGTMAAGGGAPMADNSEGADGVGNASGNWHCDSTWLGDRVITTSTRTWALPTYNNHLYKQISSQSAGSTNDNVYFGYSTPWGYFDFNRFHCHFSPRDWQRLINNNWGFRPKKLNFKLFNIQVKEVTTNDGVTTIANNLTSTVQVFSDSEYQLPYVLGSAHQGCLPPFPADVFMIPQYGYLTLNNGSQSVGRSSFYCLEYFPSQMLRTGNNFTFSYTFEDVPFHSSYAHSQSLDRLMNPLIDQYLYYLARTQSNAGGTAGNRELQFYQGGPTTMAEQAKNWLPGPCFRQQRVSKTLDQNNNSNFAWTGATKYHLNGRNSLVNPGVAMATHKDDEERFFPSSGVLIFGKTGAANKTTLENVLMTNEEEIRPTNPVATEEYGIVSSNLQAASTAAQTQVVNNQGALPGMVWQNRDVYLQGPIWAKIPHTDGNFHPSPLMGGFGLKHPPPQILIKNTPVPANPPEVFTPAKLASFITQYSTGQVSVEIEWELQKENSKRWNPEIQYTSNFDKQTGVDFAVDSQGVYSEP

SEQ ID NO: 36 - DNA, 1933 bp, synthetic construct
  misc_feature 1..1933: note = source = /note="Description of Artificial Sequence: Synthetic polynucleotide"
  source 1..1933: mol_type = other DNA
caaggcctacgaccagcagctcaaagcgggtgacaatccgtacctgcggtataaccacgccgacgccgagtttcaggagcgtcttcaagaagatacgtcttttgggggcaacctcgggcgagcagtcttccaggccaaaaagcgggttctcgaacctcttggtctggttgagacgccagctaagacggcacctggaaagaagcgaccggtagactcgccagactccacctcgggcatcggcaagaaaggccagcagcccgcgaaaaagagactcaactttgggcagactggcgactcagagtcagtccccgaccctcaaccaatcggagaaccaccagcaggcccctctggtctgggatctggtacaatggctgcaggcggtggcgcaccaatggctgacaataacgagggcgccgacggagtgggtaatgcctcaggaaattggcattgcgattccacatggctgggcgacagagtcatcaccaccagcacccgaacctgggccctgcccacctacaacaaccacctctacaagcaaatctccagtcagtcagcagggagcaccaacgataacgtctatttcggctacagcaccccctgggggtattttgacttcaacagattccattgccacttctcaccacgtgactggcagcgacttatcaacaacaactggggattccggcccaagaagctcaacttcaagctcttcaacatccaggtcaaggaggtcacgacgaatgacggcgtcacaaccatcgctaataaccttaccagcacggttcaggtcttttcggacccggaatatcaactgccgtacgtcctcggctccgcgcaccagggctgcctgcctccgttcccggcagacgtgttcatgattccgcagtacggatacctgactctgaacaatggcagccaatcggtaggccgttcctccttctactgcctggagtactttccttctcagatgctgagaacgggcaacaacttcacctttagctacaccttcgaggacgtgcctttccacagcagctacgcgcacagccagagtctggaccggctgatgaatcccctcatcgaccagtacctgtactacttggccagaacacagagcaacgcaggaggtactgctggcaatcgggaactgcagttttatcagggcggacctaccaccatggccgaacaagcaaagaactggctgcccggaccttgcttccggcaacagagagtatccaagacgctggatcaaaataacaacagcaactttgcctggactggtgccacaaaataccatttaaatggaagaaattcattggttaatcccggtgtcgccatggcaacccacaaggacgacgaggaacgcttcttcccttcgagcggagttctaatttttggcaaaactggagcagctaataaaactacattagaaaacgtgctcatgacaaatgaagaagaaattcgtcctaccaacccggtagctaccgaggaatacgggattgtaagcagcaacttgcaggcggctagcaccgcagcccagacacaagttgttaacaaccagggagccttacctggcatggtctggcagaaccgggacgtgtacctgcaaggtcccatttgggccaagattcctcacacggacggcaactttcacccgtctcctctaatgggtggctttggactgaaacacccgcctccccagatcctgatcaaaaacacaccggtacctgctaatcctccagaagtgtttactcctgccaagattgcttccttcatcacgcagtacagcaccgggcaagtcagcgttgagatcgagtgggagctgcagaaagagaacagcaagcgctggaacccagagattcagtacacctccaactttgacaaacagactggagtggactttgctgttgacagccagggtgtttactctgagcct

SEQ ID NO: 37 - protein, 644 aa, synthetic construct
  REGION 1..644: note = source = /note="Description of Artificial Sequence: Synthetic polypeptide"
KAYDQQLKAGDNPYLRYNHADAEFQERLQEDTSFGGNLGRAVFQAKKRVLEPLGLVETPAKTAPGKKRPVDSPDSTSGIGKKGQQPAKKRLNFGQTGDSESVPDPQPIGEPPAGPSGLGSGTMAAGGGAPMADNNEGADGVGNASGNWHCDSTWLGDRVITTSTRTWALPTYNNHLYKQISSQSAGSTNDNVYFGYSTPWGYFDFNRFHCHFSPRDWQRLINNNWGFRPKKLNFKLFNIQVKEVTTNDGVTTIANNLTSTVQVFSDPEYQLPYVLGSAHQGCLPPFPADVFMIPQYGYLTLNNGSQSVGRSSFYCLEYFPSQMLRTGNNFTFSYTFEDVPFHSSYAHSQSLDRLMNPLIDQYLYYLARTQSNAGGTAGNRELQFYQGGPTTMAEQAKNWLPGPCFRQQRVSKTLDQNNNSNFAWTGATKYHLNGRNSLVNPGVAMATHKDDEERFFPSSGVLIFGKTGAANKTTLENVLMTNEEEIRPTNPVATEEYGIVSSNLQAASTAAQTQVVNNQGALPGMVWQNRDVYLQGPIWAKIPHTDGNFHPSPLMGGFGLKHPPPQILIKNTPVPANPPEVFTPAKIASFITQYSTGQVSVEIEWELQKENSKRWNPEIQYTSNFDKQTGVDFAVDSQGVYSEP

SEQ ID NO: 38 - protein, 738 aa, synthetic construct
  REGION 1..738: note = source = /note="Description of Artificial Sequence: Synthetic polypeptide"
MAADGYLPDWLEDNLSEGIREWWALKPGAPKPKANQQKQDDGRGLVLPGYKYLGPFNGLDKGEPVNAADAAALEHDKAYDQQLKAGDNPYLRYNHADAEFQERLQEDTSFGGNLGRAVFQAKKRVLEPLGLVEEGAKTAPGKKRPVEPSPQRSPDSTTGIGKKGQQPAKKRLNFGQTGDSESVPDPQPIGEPPAGPSGLGSGTMAAGGGAPMADNNEGADGVGSSSGNWHCDSTWLGDRVITTSTRTWALPTYNNHLYKQISNGTSGGSTNDNTYFGYSTPWGYFDFNRFHCHFSPRDWQRLINNNWGFRPKRLNFKLFNIQVKEVTQNEGTKTIANNLTSTIQVFTDSEYQLPYVLGSARQGCLPPFPADVFMIPQYGYLTLNNGSQAVGRSSFYCLEYFPSQMLRTGNNFEFSYQFEDVPFHSSYAHSQSLDRLMNPLIDQYLYYLSRTQSTGGTAGTQQLLFSQAGPNNMSAQAKNWLPGPCYRQQRVSTTLSQNNNSNFAWTGATKYHLNGRDSLVNPGVAMATHKDDEERFFPSSGVLMFGKQGAGKGNVDYSSVMLTSEEEIKTTNPVATEQYGVVADNLQQQNAAPIVGAVNSQGALPGMVWQNRDVYLQGPIWAKIPHTDGNFHPSPLMGGFGLKHPPPQILIKNTPVPADPPTTFSQAKLASFITQYSTGQVSVEIEWELQKENSKRWNPEIQYTSNYYKSTNVDFAVNTDGTYSEPRPIGTRYLTRNL

SEQ ID NO: 39 - DNA, 3121 bp, synthetic construct
  misc_feature 1..3121: note = source = /note="Description of Artificial Sequence: Synthetic polynucleotide"
  source 1..3121: mol_type = other DNA
gaattcgcccttctacggctgcgtcaactggaccaatgagaactttcccttcaacgactgtgtcgacaagatggtgatctggtgggaggaggggaagatgaccgccaaggtcgtggagtcggccaaagccattctcggaggaagcaaggtgcgcgtggaccagaaatgcaagtcctcggcccagatagacccgactcccgtgatcgtcacctccaacaccaacatgtgcgccgtgattgacgggaactcaacgaccttcgaacaccagcagccgttgcaagaccggatgttcaaatttgaactcacccgccgtctggatcatgactttgggaaggtcaccaagcaggaagtcaaagactttttccggtgggcaaaggatcacgtggttgaggtggagcacgaattctacgtcaaaaagggtggagccaagaaaagacccgcccccagtgacgcagatataagtgagcccaaacgggtgcgcgagtcagttgcgcagccatcgacgtcagacgcggaagcttcgatcaactacgcagacaggtaccaaaacaaatgttctcgtcacgcgggcatgaatctgatgctgtttccctgcagacaatgcgagagaatgaatcagaattcaaatatctgcttcactcacggacagaaagactgtttagagtgctttcccgtgtcagaatctcaacccgtttctgtcgtcaaaaaggcgtatcagaaactgtgctacattcatcatatcatgggaaaggtgccagacgcttgcactgcctgcgatctggtcgatgtggatttggatgactgcatctttgaacaataaatgatttaaatcaggtatggctgccgatggttatcttccagattggctcgaggacaacctctctgagggcattcgcgagtggtgggcgctgaaacctggagccccgaagcccaaagccaaccagcaaaagcaggacggcggccggggtctggtgcttcctggctacaagtacctcggacccttcaacggactcgacaagggggagcccgtcaacgcggcggacgcagcggccctcgagcacgacaaggcctacgaccagcagctcaaagcgggtgacaatccgtacctgcggtataaccacgccgacgccgagtttcaggagcgtctgcaagaagatacgtcttttgggggcaacctcgggcgagcagtcttccaggccaagaagcgggttctcgaacctctcggtctggttgaggaaggcgctaagacggctcctggaaagaagagaccggtagagccatcaccccagcgttctccagactcctctacgggcatcggcaagaaaggccagcagcccgcgaaaaagagactcaactttgggcagactggcgactcagagtcagtgcccgaccctcaaccaatcggagaaccccccgcaggcccctctggtctgggatctggtacaatggctgcaggcggtggcgctccaatggcagacaataacgaaggcgccgacggagtgggtagttcctcaggaaattggcattgcgattccacatggctgggcgactgagtcatcaccaccagcacccgaacctgggccctccccacctacaacaaccacctctacaagcaaatctccaacgggacttcgggaggaagcaccaacgacaacacctacttcggctacagcaccccctgggggtattttgactttaacagattccactgccacttctcaccacgtgactggcagcgactcatcaacaacaactggggattccggcccaagagactcaacttcaagctcttcaacatccaggtcaaggaggtcacgcagaatgaaggcaccaagaccatcgccaataaccttaccagcacgattcaggtctttacggactcggaataccagctcccgtacgtcctcggctctgcgcaccagggctgcctgcctccgttcccggcggacgtcttcatgattcctcagtacgggtacctgactctgaacaatggcagtcaggccgtgggccgttcctccttctactgcctggagtactttccttctcaaatgctgagaacgggcaacaactttgagttcagctaccagtttgaggacgtgccttttcacagcagctacgcgcacagccaaagcctggaccggctgatgaaccccctcatcgaccagtacctgtactacctgtctcggactcagtccacgggaggtaccgcaggaactcagcagttgctattttctcaggccgggcctaataacatgtcggctcaggccaaaaactggctacccgggccctgctaccggcagtaacgcgtctccacgacactgtcgcaaaataacaacagcaactttgtctggaccggtgccaccaagtatcatctgaatggcagagactctctggtagatcccggtgtcgctatggcaacccacaaggacgacgaagagcgattttttccgtccagcggagtcataatgtttgggaaacagggagctggaaaagacaacgtggactatagcagcgtcatgctaaccagtgaggaagaaattaaaaccaccaacccagtggccacagaacagtacggcgtggtggccgataacctgcaacagcaaaacgccgctcctattgtaggggccgtcaacagtcaaggagccttacctggcatggtctggcagaaccgggacgtgtacctgcagggtcctacctgggccaagattcctcacacggacggaaactttcatccctcgccgctgatgggaggctttggactgaaacacccgcctcctcagatcctgattaagaatacacctgttcccgcggatcctccaactaccttcagtcaagctaagctggcgtcgttcatcacgcagtacagcaccggacaggtcagcgtggaaattgaatgggagctgcaggaagaaaacagcaaacgctggaacccagagattcaatacacttccaactactacaaatctacaaatgtggactttgctgttaacacagatggcacttattctgagcctcgccccatcggcacccgttacctcacccgtaatctgtaattgcttgttaatcaataaaccggttgattcgtttcagttgaactttggtctctgcgaagggcgaattc

SEQ ID NO: 40 - protein, 738 aa, synthetic construct
  REGION 1..738: note = source = /note="Description of Artificial Sequence: Synthetic polypeptide"
MAADGYLPDWLEDNLSEGIREWWALKPGAPKPKANQQKQDDGRGLVLPGYKYLGPFNGLDKGEPVNAADAAALEHDKAYDQQLKAGDNPYLRYNHADAEFQERLQEDTSFGGNLGRAVFQAKKRVLEPLGLVEEGAKTAPGKKRPVEPSPQRSPDSSTGIGKKGQQPAKKRLNFGQTGDSESVPDPQPIGEPPAGPSGLGSGTMAAGGGAPMADNNEGADGVGSSSGNWHCDSTWLGDGVITTSTRTWALPTYNNHLYKQISNGTSGGSTNDNTYFGYSTPWGYFDFNRFHCHFSPRDWQRLINNNWGFRPKSLNFKLFNIQVKEVTQNEGTKTIANNLTSTIQVFTDSEYQLPYVLGSAHQGCLPPFPADVFMIPQYGYLTLNNGSQAVGRSSFYCLEYFPSQMLRTGNNFEFSYQFEDVPFHSSYAHSQSLDRLMNPLIDQYLYYLSRTQSTGGTAGTQQLLFSQAGPNNMSAQAKNWLPGPCYRQQRVSTTLSQNDNSNFAWTGATKYHLNGRDSLVNPGVAMATHKDDEERFFPSSGVLMFGKQGAGKDNVDYSSVMLTSEEEIKTTNPVATEQYGVVADNLQQQNAAPIVGAVNSQGALPGMVWQNRDVYLQGPIWAKIPHTDGNFHPSPLMGGFGLKHPPPQILIKNTPVPADPPTTFSQAKLASFITQYSTGQVSVEIEWELQKENSKRWNPEIQYTSNYYKSTNVDFAVNTDGTYSEPRPIGTRYLTRNL

SEQ ID NO: 41 - DNA, 3121 bp, synthetic construct
  misc_feature 1..3121: note = source = /note="Description of Artificial Sequence: Synthetic polynucleotide"
  source 1..3121: mol_type = other DNA
gaattcgcccttcgcgagaccaaagttcaactgaaacgaatcaaccggtttattgattaacaagcaattacagattacgggtgaggtaacgggtgccgatggggcgaggctcagaataagtgccatctgtgttaacagcaaagtccacatttgtagatttgtagtagttggaagtgtattgaatctctgggttccagcgtttgctgttttctttctgcagctcccattcaatttccacgctgacctgtccggtgctgtactgcgtgatgaacgacgccagcttagcttgactgaaggtagttggaggatccgcgggaacaggtgtattcttaatcaggatctgaggaggcgggtgtttcagtccaaagcctcccatcagcggcgagggatgaaagtttccgtccgtgtgaggaatcttggcccagataggaccctgcaggtacacgtcccggttctgccagaccatgccaggtaaggctccttgactgttgacggcccctacaataggagcggcgttttgctgttgcaggttatcggccaccacgccgtactgttctgtggccactgggttggtggttttaatttcttcctcactggttagcataacgctgctatagtccacgttgtcttttccagctccctgtttcccaaacattaagactccgctggacggaaaaaatcgctcttcgtcgtccttgtgggttgccatagcgacaccgggatttaccagagagtctctgccattcagatgatacttggtggcaccggtccaggcaaagttgctgttgtcattttgcgacagtgtcgtggagacgcgttgctgccggtagcagggcccgggtagccagtttttggcctgagccgacatgttattaggcccggcctgagaaaatagcaactgctgagttcctgcggtacctcccgtggactgagtccgagacaggtagtacaggtactggtcgatgagggggttcatcagccggtccaggctttggctgtgcgcgtagctgctgtgaaaaggcacgtcctcaaactggtagctgaactcaaagttgttgcccgttctcagcatttgagaaggaaagtactccaggcagtagaaggaggaacggcccacggcctgactgccattgttcagagtcaggtacccgtactgaggaatcatgaagacgtccgccgggaacggaggcaggcagccctggtgcgcagagccgaggacgtacgggagctggtattccgagtccgtaaagacctgaatcgtgctggtaaggttattggcgatggtcttggtgccttcattctgcgtgacctccttgacctggatgttgaagagcttgaagttgaggctcttgggccggaatccccagttgttgttgatgagtcgctgccagtcacgtggtgagaagtggcagtggaatctgttaaagtcaaaatacccccagggggtgctgtagccgaagtaggtgttgtcgttggtgcttcctcccgaagtcccgttggagatttgcttgtagaggtggttgttgtaggtggggagggcccaggttcgggtgctggtggtgatgactccgtcgcccagccatgtggaatcgcaatgccaatttcctgaggaactacccactccgtcggcgccttcgttattgtctgccattggagcgccaccgcctgcagccattgtaccagatcccagaccagaggggcctgcggggggttctccgattggttgagggtcgggcactgactctgagtcgccagtctgcccaaagttgagtctctttttcgcgggctgctggcctttcttgccgatgcccgtagaggagtctggagaacgctggggtgatggctctaccggtctcttctttccaggagccgtcttagcgccttcctcaaccagaccgagaggttcgagaacccgcttcttggcctggaagactgctcgcccgaggttgcccccaaaagacgtatcttcttgcagacgctcctgaaactcggcgtcggcgtggttataccgcaggtacggattgtcacccgctttgagctgctggtcgtaggccttgtcgtgctcgagggccgctgcgtccgccgcgttgacgggctcccccttgtcgagtccgttgaagggtccgaggtacttgtagccaggaagcaccagaccccggccgtcgtcctgcttttgctggttggctttgggcttcggggctccaggtttcagcgcccaccactcgcgaatgccctcagagaggttgtcctcgagccaatctggaagataaccatcggcagccatacctgatttaaatcatttattgttcaaagatgcagtcatccaaatccacattgaccagatcgcaggcagtgcaagcgtctggcacctttcccatgatatgatgaatgtagcacagtttctgatacgcctttttgacgacagaaacgggttgagattctgacacgggaaagcactctaaacagtctttctgtccgtgagtgaagcagatatttgaattctgattcattctctcgcattgtctgcagggaaacagcatcagattcatgcccacgtgacgagaacatttgttttggtacctgtctgcgtagttgatcgaagcttccgcgtctgacgtcgatggctgcgcaactgactcgcgcacccgtttgggctcacttatatctgcgtcactgggggcgggtcttttcttggctccaccctttttgacgtagaattcatgctccacctcaaccacgtgatcctttgcccaccggaaaaagtctttgacttcctgcttggtgaccttcccaaagtcatgatccagacggcgggtgagttcaaatttgaacatccggtcttgcaacggctgctggtgttcgaaggtcgttgagttcccgtcaatcacggcgcacatgttggtgttggaggtgacgatcacgggagtcgggtctatctgggccgaggacttgcatttctggtccacgcgcaccttgcttcctccgagaatggctttggccgactccacgaccttggcggtcatcttcccctcctcccaccagatcaccatcttgtcgacacagtcgttgaagggaaagttctcattggtccagttgacgcagccgtagaaagggcgaattc

SEQ ID NO: 42 - DNA, 2211 bp, synthetic construct
  misc_feature 1..2211: note = source = /note="Description of Artificial Sequence: Synthetic polynucleotide"
  source 1..2211: mol_type = other DNA
atggctgctgacggttatcttccagattggctcgaggacaacctttctgaaggcattcgtgagtggtgggctctgaaacctggagtccctcaacccaaagcgaaccaacaacaccaggacaaccgtcggggtcttgtgcttccgggttacaaatacctcggacccggtaacggactcgacaaaggagagccggtcaacgaggcggacgcggcagccctcgaacacgacaaagcttacgaccagcagctcaaggccggtgacaacccgtacctcaagtacaaccacgccgacgccgagtttcaggagcgtcttcaagaagatacgtcttttgggggcaaccttggcagagcagtcttccaggccaaaaagaggatccttgagcctcttggtctggttgaggaagcagctaaaacggctcctggaaagaagggggctgtagatcagtctcctcaggaaccggactcatcatctggtgttggcaaatcgggcaaacagcctgccagaaaaagactaaatttcggtcagactggagactcagagtcagtcccagaccctcaacctctcggagaaccaccagcagcccccacaagtttgggatctaatacaatggcttcaggcggtggcgcaccaatggcagacaataacgagggtgccgatggagtgggtaattcctcaggaaattggcattgcgattcccaatggctgggcgacagagtcatcaccaccagcaccagaacctgggccctgcccacttacaacaaccatctctacaagcaaatctccagccaatcaggagcttcaaacgacaaccactactttggctacagcaccccttgggggtattttgactttaacagattccactgccacttctcaccacgtgactggcagcgactcattaacaacaactggggattccggcccaagaaactcagcttcaagctcttcaacatccaagttagaggggtcacgcagaacgatggcacgacgactattgccaataaccttaccagcacggttcaagtgtttacggactcggagtatcagctcccgtacgtgctcgggtcggcgcaccaaggctgtctcccgccgtttccagcggacgtcttcatggtccctcagtatggatacctcaccctgaacaacggaagtcaagcggtgggacgctcatccttttactgcctggagtacttcccttcgcagatgctaaggactggaaataacttccaattcagctataccttcgaggatgtaccttttcacagcagctacgctcacagccagagtttggatcgcttgatgaatcctcttattgatcagtatctgtactacctgaacagaacgcaaggaacaacctctggaacaaccaaccaatcacggctgctttttagccaggctgggcctcagtctatgtctttgcaggccagaaattggctacctgggccctgctaccggcaacagagactttcaaagactgctaacgacaacaacaacagtaactttccttggacagcggccagcaaatatcatctcaatggccgcgactcgctggtgaatccaggaccagctatggccagtcacaaggacgatgaagaaaaatttttccctatgcacggcaatctaatatttggcaaagaagggacaacggcaagtaacgcagaattagataatgtaatgattacggatgaagaagagattcgtaccaccaatcctgtggcaacagagcagtatggaactgtggcaaataacttgcagagctcaaatacagctcccacgactggaactgtcaatcatcagggggccttacctggcatggtgtggcaagatcgtgacgtgtaccttcaaggacctatctgggcaaagattcctcacacggatggacactttcatccttctcctctgatgggaggctttggactgaaacatccgcctcctcaaatcatgatcaaaaatactccggtaccggcaaatcctccgacgactttcagcccggccaagtttgcttcatttatcactcagtactccactggacaggtcagcgtggaaattgagtgggagctacagaaagaaaacagcaaacgttggaatccagagattcagtacacttccaactacaacaagtctgttaatgtggactttactgtagacactaatggtgtttatagtgaacctcgccctattggaacccggtatctcacacgaaacttgtga

SEQ ID NO: 43 - protein, 736 aa, Adeno-associated virus 3
MAADGYLPDWLEDNLSEGIREWWALKPGVPQPKANQQHQDNRRGLVLPGYKYLGPGNGLDKGEPVNEADAAALEHDKAYDQQLKAGDNPYLKYNHADAEFQERLQEDTSFGGNLGRAVFQAKKRILEPLGLVEEAAKTAPGKKGAVDQSPQEPDSSSGVGKSGKQPARKRLNFGQTGDSESVPDPQPLGEPPAAPTSLGSNTMASGGGAPMADNNEGADGVGNSSGNWHCDSQWLGDRVITTSTRTWALPTYNNHLYKQISSQSGASNDNHYFGYSTPWGYFDFNRFHCHFSPRDWQRLINNNWGFRPKKLSFKLFNIQVRGVTQNDGTTTIANNLTSTVQVFTDSEYQLPYVLGSAHQGCLPPFPADVFMVPQYGYLTLNNGSQAVGRSSFYCLEYFPSQMLRTGNNFQFSYTFEDVPFHSSYAHSQSLDRLMNPLIDQYLYYLNRTQGTTSGTTNQSRLLFSQAGPQSMSLQARNWLPGPCYRQQRLSKTANDNNNSNFPWTAASKYHLNGRDSLVNPGPAMASHKDDEEKFFPMHGNLIFGKEGTTASNAELDNVMITDEEEIRTTNPVATEQYGTVANNLQSSNTAPTTGTVNHQGALPGMVWQDRDVYLQGPIWAKIPHTDGHFHPSPLMGGFGLKHPPPQIMIKNTPVPANPPTTFSPAKFASFITQYSTGQVSVEIEWELQKENSKRWNPEIQYTSNYNKSVNVDFTVDTNGVYSEPRPIGTRYLTRNL

SEQ ID NO: 44 - DNA, 4726 bp, Adeno-associated virus 3
  source 1..4726: mol_type = unassigned DNA
ttggccactccctctatgcgcactcgctcgctcggtggggcctggcgaccaaaggtcgccagacggacgtgctttgcacgtccggccccaccgagcgagcgagtgcgcatagagggagtggccaactccatcactagaggtatggcagtgacgtaacgcgaagcgcgcgaagcgagaccacgcctaccagctgcgtcagcagtcaggtgacccttttgcgacagtttgcgacaccacgtggccgctgagggtatatattctcgagtgagcgaaccaggagctccattttgaccgcgaaatttgaacgagcagcagccatgccggggttctacgagattgtcctgaaggtcccgagtgacctggacgagcgcctgccgggcatttctaactcgtttgttaactgggtggccgagaaggaatgggacgtgccgccggattctgacatggatccgaatctgattgagcaggcacccctgaccgtggccgaaaagcttcagcgcgagttcctggtggagtggcgccgcgtgagtaaggccccggaggccctcttttttgtccagttcgaaaagggggagacctacttccacctgcacgtgctgattgagaccatcggggtcaaatccatggtggtcggccgctacgtgagccagattaaagagaagctggtgacccgcatctaccgcggggtcgagccgcagcttccgaactggttcgcggtgaccaaaacgcgaaatggcgccgggggcgggaacaaggtggtggacgactgctacatccccaactacctgctccccaagacccagcccgagctccagtgggcgtggactaacatggaccagtatttaagcgcctgtttgaatctcgcggagcgtaaacggctggtggcgcagcatctgacgcacgtgtcgcagacgcaggagcagaacaaagagaatcagaaccccaattctgacgcgccggtcatcaggtcaaaaacctcagccaggtacatggagctggtcgggtggctggtggaccgcgggatcacgtcagaaaagcaatggattcaggaggaccaggcctcgtacatctccttcaacgccgcctccaactcgcggtcccagatcaaggccgcgctggacaatgcctccaagatcatgagcctgacaaagacggctccggactacctggtgggcagcaacccgccggaggacattaccaaaaatcggatctaccaaatcctggagctgaacgggtacgatccgcagtacgcggcctccgtcttcctgggctgggcgcaaaagaagttcgggaagaggaacaccatctggctctttgggccggccacgacgggtaaaaccaacatcgcggaagccatcgcccacgccgtgcccttctacggctgcgtaaactggaccaatgagaactttcccttcaacgattgcgtcgacaagatggtgatctggtgggaggagggcaagatgacggccaaggtcgtggagagcgccaaggccattctgggcggaagcaaggtgcgcgtggaccaaaagtgcaagtcatcggcccagatcgaacccactcccgtgatcgtcacctccaacaccaacatgtgcgccgtgattgacgggaacagcaccaccttcgagcatcagcagccgctgcaggaccggatgtttgaatttgaacttacccgccgtttggaccatgactttgggaaggtcaccaaacaggaagtaaaggactttttccggtgggcttccgatcacgtgactgacgtggctcatgagttctacgtcagaaagggtggagctaagaaacgccccgcctccaatgacgcggatgtaagcgagccaaaacgggagtgcacgtcacttgcgcagccgacaacgtcagacgcggaagcaccggcggactacgcggacaggtaccaaaacaaatgttctcgtcacgtgggcatgaatctgatgctttttccctgtaaaacatgcgagagaatgaatcaaatttccaatgtctgttttacgcatggtcaaagagactgtggggaatgcttccctggaatgtcagaatctcaacccgtttctgtcgtcaaaaagaagacttatcagaaactgtgtccaattcatcatatcctgggaagggcacccgagattgcctgttcggcctgcgatttggccaatgtggacttggatgactgtgtttctgagcaataaatgacttaaaccaggtatggctgctgacggttatcttccagattggctcgaggacaacctttctgaaggcattcgtgagtggtgggctctgaaacctggagtccctcaacccaaagcgaaccaacaacaccaggacaaccgtcggggtcttgtgcttccgggttacaaatacctcggacccggtaacggactcgacaaaggagagccggtcaacgaggcggacgcggcagccctcgaacacgacaaagcttacgaccagcagctcaaggccggtgacaacccgtacctcaagtacaaccacgccgacgccgagtttcaggagcgtcttcaagaagatacgtcttttgggggcaaccttggcagagcagtcttccaggccaaaaagaggatccttgagcctcttggtctggttgaggaagcagctaaaacggctcctggaaagaagggggctgtagatcagtctcctcaggaaccggactcatcatctggtgttggcaaatcgggcaaacagcctgccagaaaaagactaaatttcggtcagactggagactcagagtcagtcccagaccctcaacctctcggagaaccaccagcagcccccacaagtttgggatctaatacaatggcttcaggcggtggcgcaccaatggcagacaataacgagggtgccgatggagtgggtaattcctcaggaaattggcattgcgattcccaatggctgggcgacagagtcatcaccaccagcaccagaacctgggccctgcccacttacaacaaccatctctacaagcaaatctccagccaatcaggagcttcaaacgacaaccactactttggctacagcaccccttgggggtattttgactttaacagattccactgccacttctcaccacgtgactggcagcgactcattaacaacaactggggattccggcccaagaaactcagcttcaagctcttcaacatccaagttagaggggtcacgcagaacgatggcacgacgactattgccaataaccttaccagcacggttcaagtgtttacggactcggagtatcagctcccgtacgtgctcgggtcggcgcaccaaggctgtctcccgccgtttccagcggacgtcttcatggtccctcagtatggatacctcaccctgaacaacggaagtcaagcggtgggacgctcatccttttactgcctggagtacttcccttcgcagatgctaaggactggaaataacttccaattcagctataccttcgaggatgtaccttttcacagcagctacgctcacagccagagtttggatcgcttgatgaatcctcttattgatcagtatctgtactacctgaacagaacgcaaggaacaacctctggaacaaccaaccaatcacggctgctttttagccaggctgggcctcagtctatgtctttgcaggccagaaattggctacctgggccctgctaccggcaacagagactttcaaagactgctaacgacaacaacaacagtaactttccttggacagcggccagcaaatatcatctcaatggccgcgactcgctggtgaatccaggaccagctatggccagtcacaaggacgatgaagaaaaatttttccctatgcacggcaatctaatatttggcaaagaagggacaacggcaagtaacgcagaattagataatgtaatgattacggatgaagaagagattcgtaccaccaatcctgtggcaacagagcagtatggaactgtggcaaataacttgcagagctcaaatacagctcccacgactggaactgtcaatcatcagggggccttacctggcatggtgtggcaagatcgtgacgtgtaccttcaaggacctatctgggcaaagattcctcacacggatggacactttcatccttctcctctgatgggaggctttggactgaaacatccgcctcctcaaatcatgatcaaaaatactccggtaccggcaaatcctccgacgactttcagcccggccaagtttgcttcatttatcactcagtactccactggacaggtcagcgtggaaattgagtgggagctacagaaagaaaacagcaaacgttggaatccagagattcagtacacttccaactacaacaagtctgttaatgtggactttactgtagacactaatggtgtttatagtgaacctcgccctattggaacccggtatctcacacgaaacttgtgaatcctggttaatcaataaaccgtttaattcgtttcagttgaactttggctcttgtgcacttctttatctttatcttgtttccatggctactgcgtagataagcagcggcctgcggcgcttgcgcttcgcggtttacaactgctggttaatatttaactctcgccatacctctagtgatggagttggccactccctctatgcgcactcgctcgctcggtggggcctggcgaccaaaggtcgccagacggacgtgctttgcacgtccggccccaccgagcgagcgagtgcgcatagagggagtggccaa

SEQ ID NO: 45 - protein, 737 aa, synthetic construct
  REGION 1..737: note = source = /note="Description of Artificial Sequence: Synthetic polypeptide"
MAADGYLPDWLEDNLSEGIREWWDLKPGAPKPKANQQKQDNGRGLVLPGYKYLGPFNGLDKGEPVNAADAAALEHDKAYDQQLNAGDNPYLRYNHADAEFQERLQEDTSFGGNLGRAVFQAKKRVLEPLGLVEEGAKTAPAKKRPVEPSPQRSPDSSTGIGKKGQQPARKRLNFGQTGDSESVPDPQPLGEPPAAPSSVGSGTVAAGGGAPMADNNEGADGVGNASGNWHCDSTWLGDRVITTSTRTWALPTYNNHLYEQISSETAGSTNDNTYFGYSTPWGYFDFNRFHCHFSPRDWQRLINNNWGFRPKKLRFKLFNIQVKEVTTNDGVTTIANNLTSTIQVFSDSEYQLPYVLGSAHQGCLPPFPADVFMIPQYGYLTLNNGSQSVGRSSFYCLEYFPSQMLRTGNNFEFSYSFEDVPFHSSYAHSQSLDRLMNPLIDQYLYYLARTQSDPGGTAGNRELQFYQGGPSTMAEQAKNWLPGPCFRQQRVSKTLDQNNNSNFAWTGATKYHLNGRNSLVNPGVAMATHKDDEDRFFPSSGVLIFGKTGATNKTTLENVLMTNEEEIRPTNPVATEEYGIVSSNLQAANTAAQTQVVNNQGALPGMVWQNRDVYLQGPIWAKIPHTDGNFHPSPLMGGFGLKHPPPQILIKNTPVPANPPEVFTPAKFASFITQYSTGQVSVEIEWELQKENSKRWDPEIQYTSNFEKQTGVDFAVDSQGVYSEPRPIGTRYLTRNL

SEQ ID NO: 46 - DNA, 2211 bp, synthetic construct
  misc_feature 1..2211: note = source = /note="Description of Artificial Sequence: Synthetic polynucleotide"
  source 1..2211: mol_type = other DNA
atggctgctgacggttatcttccagattggctcgaggacaacctttctgaaggcattcgtgagtggtgggctctgaaacctggagtccctcaacccaaagcgaaccaacaacaccaggacaaccgtcggggtcttgtgcttccgggttacaaatacctcggacccggtaacggactcgacaaaggagagccggtcaacgaggcggacgcggcagccctcgaacacgacaaagcttacgaccagcagctcaaggccggtgacaacccgtacctcaagtacaaccacgccgacgccgagtttcaggagcgtcttcaagaagatacgtcttttgggggcaaccttggcagagcagtcttccaggccaaaaagaggatccttgagcctcttggtctggttgaggaagcagctaaaacggctcctggaaagaagggggctgtagatcagtctcctcaggaaccggactcatcatctggtgttggcaaatcgggcaaacagcctgccagaaaaagactaaatttcggtcagactggagactcagagtcagtcccagaccctcaacctctcggagaaccaccagcagcccccacaagtttgggatctaatacaatggcttcaggcggtggcgcaccaatggcagacaataacgagggtgccgatggagtgggtaattcctcaggaaattggcattgcgattcccaatggctgggcgacagagtcatcaccaccagcaccagaacctgggccctgcccacttacaacaaccatctctacaagcaaatctccagccaatcaggagcttcaaacgacaaccactactttggctacagcaccccttgggggtattttgactttaacagattccactgccacttctcaccacgtgactggcagcgactcattaacaacaactggggattccggcccaagaaactcagcttcaagctcttcaacatccaagttagaggggtcacgcagaacgatggcacgacgactattgccaataaccttaccagcacggttcaagtgtttacggactcggagtatcagctcccgtacgtgctcgggtcggcgcaccaaggctgtctcccgccgtttccagcggacgtcttcatggtccctcagtatggatacctcaccctgaacaacggaagtcaagcggtgggacgctcatccttttactgcctggagtacttcccttcgcagatgctaaggactggaaataacttccaattcagctataccttcgaggatgtaccttttcacagcagctacgctcacagccagagtttggatcgcttgatgaatcctcttattgatcagtatctgtactacctgaacagaacgcaaggaacaacctctggaacaaccaaccaatcacggctgctttttagccaggctgggcctcagtctatgtctttgcaggccagaaattggctacctgggccctgctaccggcaacagagactttcaaagactgctaacgacaacaacaacagtaactttccttggacagcggccagcaaatatcatctcaatggccgcgactcgctggtgaatccaggaccagctatggccagtcacaaggacgatgaagaaaaatttttccctatgcacggcaatctaatatttggcaaagaagggacaacggcaagtaacgcagaattagataatgtaatgattacggatgaagaagagattcgtaccaccaatcctgtggcaacagagcagtatggaactgtggcaaataacttgcagagctcaaatacagctcccacgactggaactgtcaatcatcagggggccttacctggcatggtgtggcaagatcgtgacgtgtaccttcaaggacctatctgggcaaagattcctcacacggatggacactttcatccttctcctctgatgggaggctttggactgaaacatccgcctcctcaaatcatgatcaaaaatactccggtaccggcaaatcctccgacgactttcagcccggccaagtttgcttcatttatcactcagtactccactggacaggtcagcgtggaaattgagtgggagctacagaaagaaaacagcaaacgttggaatccagagattcagtacacttccaactacaacaagtctgttaatgtggactttactgtagacactaatggtgtttatagtgaacctcgccctattggaacccggtatctcacacgaaacttgtaa

SEQ ID NO: 47 - protein, 736 aa, synthetic construct; identical to SEQ ID NO: 43
  REGION 1..736: note = source = /note="Description of Artificial Sequence: Synthetic polypeptide"

SEQ ID NO: 48 - protein, 736 aa, Adeno-associated virus 3; identical to SEQ ID NO: 43

SEQ ID NO: 49 - protein, 624 aa, Adeno-associated virus 3
MPGFYEIVLKVPSDLDERLPGISNSFVNWVAEKEWDVPPDSDMDPNLIEQAPLTVAEKLQREFLVEWRRVSKAPEALFFVQFEKGETYFHLHVLIETIGVKSMVVGRYVSQIKEKLVTRIYRGVEPQLPNWFAVTKTRNGAGGGNKVVDDCYIPNYLLPKTQPELQWAWTNMDQYLSACLNLAERKRLVAQHLTHVSQTQEQNKENQNPNSDAPVIRSKTSARYMELVGWLVDRGITSEKQWIQEDQASYISFNAASNSRSQIKAALDNASKIMSLTKTAPDYLVGSNPPEDITKNRIYQILELNGYDPQYAASVFLGWAQKKFGKRNTIWLFGPATTGKTNIAEAIAHAVPFYGCVNWTNENFPFNDCVDKMVIWWEEGKMTAKVVESAKAILGGSKVRVDQKCKSSAQIEPTPVIVTSNTNMCAVIDGNSTTFEHQQPLQDRMFEFELTRRLDHDFGKVTKQEVKDFFRWASDHVTDVAHEFYVRKGGAKKRPASNDADVSEPKRECTSLAQPTTSDAEAPADYADRYQNKCSRHVGMNLMLFPCKTCERMNQISNVCFTHGQRDCGECFPGMSESQPVSVVKKKTYQKLCPIHHILGRAPEIACSACDLANVDLDDCVSEQ

SEQ ID NO: 50 - protein, 736 aa, Adeno-associated virus 3
MAADGYLPDWLEDNLSEGIREWWALKPGVPQPKANQQHQDNRRGLVLPGYKYLGPGNGLDKGEPVNEADAAALEHDKAYDQQLKAGDNPYLKYNHADAEFQERLQEDTSFGGNLGRAVFQAKKRILEPLGLVEEAAKTAPGKKRPVDQSPQEPDSSSGVGKSGKQPARKRLNFGQTGDSESVPDPQPLGEPPAAPTSLGSNTMASGGGAPMADNNEGADGVGNSSGNWHCDSQWLGDRVITTSTRTWALPTYNNHLYKQISSQSGASNDNHYFGYSTPWGYFDFNRFHCHFSPRDWQRLINNNWGFRPKKLSFKLFNIQVKEVTQNDGTTTIANNLTSTVQVFTDSEYQLPYVLGSAHQGCLPPFPADVFMVPQYGYLTLNNGSQAVGRSSFYCLEYFPSQMLRTGNNFQFSYTFEDVPFHSSYAHSQSLDRLMNPLIDQYLYYLNRTQGTTSGTTNQSRLLFSQAGPQSMSLQARNWLPGPCYRQQRLSKTANDNNNSNFPWTAASKYHLNGRDSLVNPGPAMASHKDDEEKFFPMHGNLIFGKEGTTASNAELDNVMITDEEEIRTTNPVATEQYGTVANNLQSSNTAPTTRTVNDQGALPGMVWQDRDVYLQGPIWAKIPHTDGHFHPSPLMGGFGLKHPPPQIMIKNTPVPANPPTTFSPAKFASFITQYSTGQVSVEIEWELQKENSKRWNPEIQYTSNYNKSVNVDFTVDTNGVYSEPRPIGTRYLTRNL

SEQ ID NO: 51 - protein, 624 aa, Adeno-associated virus 3
MPGFYEIVLKVPSDLDEHLPGISNSFVNWVAEKEWELPPDSDMDPNLIEQAPLTVAEKLQREFLVEWRRVSKAPEALFFVQFEKGETYFHLHVLIETIGVKSMVVGRYVSQIKEKLVTRIYRGVEPQLPNWFAVTKTRNGAGGGNKVVDDCYIPNYLLPKTQPELQWAWTNMDQYLSACLNLAERKRLVAQHLTHVSQTQEQNKENQNPNSDAPVIRSKTSARYMELVGWLVDRGITSEKQWIQEDQASYISFNAASNSRSQIKAALDNASKIMSLTKTAPDYLVGSNPPEDITKNRIYQILELNGYDPQYAASVFLGWAQKKFGKRNTIWLFGPATTGKTNIAEAIAHAVPFYGCVNWTNENFPFNDCVDKMVIWWEEGKMTAKVVESAKAILGGSKVRVDQKCKSSAQIEPTPVIVTSNTNMCAVIDGNSTTFEHQQPLQDRMFKFELTRRLDHDFGKVTKQEVKDFFRWASDHVTDVAHEFYVRKGGAKKRPASNDADVSEPKRQCTSLAQPTTSDAEAPADYADRYQNKCSRHVGMNLMLFPCKTCERMNQISNVCFTHGQRDCGECFPGMSESQPVSVVKKKTYQKLCPIHHILGRAPEIACSACDLANVDLDDCVSEQ

SEQ ID NO: 52 - DNA, 4722 bp, Adeno-associated virus 3
  source 1..4722: mol_type = unassigned DNA
tggccactccctctatgcgcactcgctcgctcggtggggcctggcgaccaaaggtcgccagacggacgtgctttgcacgtccggccccaccgagcgagcgagtgcgcatagagggagtggccaactccatcactagaggtatggcagtgacgtaacgcgaagcgcgcgaagcgagaccacgcctaccagctgcgtcagcagtcaggtgacccttttgcgacagtttgcgacaccacgtggccgctgagggtatatattctcgagtgagcgaaccaggagctccattttgaccgcgaaatttgaacgagcagcagccatgccggggttctacgagattgtcctgaaggtcccgagtgacctggacgagcacctgccgggcatttctaactcgtttgttaactgggtggccgagaaggaatgggagctgccgccggattctgacatggatccgaatctgattgagcaggcacccctgaccgtggccgaaaagcttcagcgcgagttcctggtggagtggcgccgcgtgagtaaggccccggaggccctcttttttgtccagttcgaaaagggggagacctacttccacctgcacgtgctgattgagaccatcggggtcaaatccatggtggtcggccgctacgtgagccagattaaagagaagctggtgacccgcatctaccgcggggtcgagccgcagcttccgaactggttcgcggtgaccaaaacgcgaaatggcgccgggggcgggaacaaggtggtggacgactgctacatccccaactacctgctccccaagacccagcccgagctccagtgggcgtggactaacatggaccagtatttaagcgcctgtttgaatctcgcggagcgtaaacggctggtggcgcagcatctgacgcacgtgtcgcagacgcaggagcagaacaaagagaatcagaaccccaattctgacgcgccggtcatcaggtcaaaaacctcagccaggtacatggagctggtcgggtggctggtggaccgcgggatcacgtcagaaaagcaatggattcaggaggaccaggcctcgtacatctccttcaacgccgcctccaactcgcggtcccagatcaaggccgcgctggacaatgcctccaagatcatgagcctgacaaagacggctccggactacctggtgggcagcaacccgccggaggacattaccaaaaatcggatctaccaaatcctggagctgaacgggtacgatccgcagtacgcggcctccgtcttcctgggctgggcgcaaaagaagttcgggaagaggaacaccatctggctctttgggccggccacgacgggtaaaaccaacatcgcggaagccatcgcccacgccgtgcccttctacggctgcgtaaactggaccaatgagaactttcccttcaacgattgcgtcgacaagatggtgatctggtgggaggagggcaagatgacggccaaggtcgtggagagcgccaaggccattctgggcggaagcaaggtgcgcgtggaccaaaagtgcaagtcatcggcccagatcgaacccactcccgtgatcgtcacctccaacaccaacatgtgcgccgtgattgacgggaacagcaccaccttcgagcatcagcagccgctgcaggaccggatgtttaaatttgaacttacccgccgtttggaccatgactttgggaaggtcaccaaacaggaagtaaaggactttttccggtgggcttccgatcacgtgactgacgtggctcatgagttctacgtcagaaagggtggagctaagaaacgccccgcctccaatgacgcggatgtaagcgagccaaaacggcagtgcacgtcacttgcgcagccgacaacgtcagacgcggaagcaccggcggactacgcggacaggtaccaaaacaaatgttctcgtcacgtgggcatgaatctgatgctttttccctgtaaaacatgcgagagaatgaatcaaatttccaatgtctgttttacgcatggtcaaagagactgtggggaatgcttccctggaatgtcagaatctcaacccgtttctgtcgtcaaaaagaagacttatcagaaactgtgtccaattcatcatatcctgggaagggcacccgagattgcctgttcggcctgcgatttggccaatgtggacttggatgactgtgtttctgagcaataaatgacttaaaccaggtatggctgctgacggttatcttccagattggctcgaggacaacctttctgaaggcattcgtgagtggtgggctctgaaacctggagtccctcaacccaaagcgaaccaacaacaccaggacaaccgtcggggtcttgtgcttccgggttacaaatacctcggacccggtaacggactcgacaaaggagagccggtcaacgaggcggacgcggcagccctcgaacacgacaaagcttacgaccagcagctcaaggccggtgacaacccgtacctcaagtacaaccacgccgacgccgagtttcaggagcgtcttcaagaagatacgtcttttgggggcaaccttggcagagcagtcttccaggccaaaaagaggatccttgagcctcttggtctggttgaggaagcagctaaaacggctcctggaaagaagaggcctgtagatcagtctcctcaggaaccggactcatcatctggtgttggcaaatcgggcaaacagcctgccagaaaaagactaaatttcggtcagactggcgactcagagtcagtcccagaccctcaacctctcggagaaccaccagcagcccccacaagtttgggatctaatacaatggcttcaggcggtggcgcaccaatggcagacaataacgagggtgccgatggagtgggtaattcctcaggaaattggcattgcgattcccaatggctgggcgacagagtcatcaccaccagcaccagaacctgggccctgcccacttacaacaaccatctctacaagcaaatctccagccaatcaggagcttcaaacgacaaccactactttggctacagcaccccttgggggtattttgactttaacagattccactgccacttctcaccacgtgactggcagcgactcattaacaacaactggggattccggcccaagaaactcagcttcaagctcttcaacatccaagttaaagaggtcacgcagaacgatggcacgacgactattgccaataaccttaccagcacggttcaagtgtttacggactcggagtatcagctcccgtacgtgctcgggtcggcgcaccaaggctgtctcccgccgtttccagcggacgtcttcatggtccctcagtatggatacctcaccctgaacaacggaagtcaagcggtgggacgctcatccttttactgcctggagtacttcccttcgcagatgctaaggactggaaataacttccaattcagctataccttcgaggatgtaccttttcacagcagctacgctcacagccagagtttggatcgcttgatgaatcctcttattgatcagtatctgtactacctgaacagaacgcaaggaacaacctctggaacaaccaaccaatcacggctgctttttagccaggctgggcctcagtctatgtctttgcaggccagaaattggctacctgggccctgctaccggcaacagagactttcaaagactgctaacgacaacaacaacagtaactttccttggacagcggccagcaaatatcatctcaatggccgcgactcgctggtgaatccaggaccagctatggccagtcacaaggacgatgaagaaaaatttttccctatgcacggcaatctaatatttggcaaagaagggacaacggcaagtaacgcagaattagataatgtaatgattacggatgaagaagagattcgtaccaccaatcctgtggcaacagagcagtatggaactgtggcaaataacttgcagagctcaaatacagctcccacgactagaactgtcaatgatcagggggccttacctggcatggtgtggcaagatcgtgacgtgtaccttcaaggacctatctgggcaaagattcctcacacggatggacactttcatccttctcctctgatgggaggctttggactgaaacatccgcctcctcaaatcatgatcaaaaatactccggtaccggcaaatcctccgacgactttcagcccggccaagtttgcttcatttatcactcagtactccactggacaggtcagcgtggaaattgagtgggagctacagaaagaaaacagcaaacgttggaatccagagattcagtacacttccaactacaacaagtctgttaatgtggactttactgtagacactaatggtgtttatagtgaacctcgccctattggaacccggtatctcacacgaaacttgtaatcctggttaatcaataaaccgtttaattcgtttcagttgaactttggctcttgtgcacttcttatcttatcttgtttccatggctactgcgtagataagcagcggcctgcggcgcttgcgcttcgcggtttacaactgctggttaatatttaactctcgccatacctctagtgatggagttggccactccctctatgcgcactcgctcgctcggtggggccggacgtgcaaagcacgtccgtctggcgacctttggtcgccaggccccaccgagcgagcgagtgcgcatagagggagtggccaa

SEQ ID NO: 53 - DNA, 1800 bp, Adeno-associated virus 4
  misc_difference 342: note = modified_base - a, c, t, or g
  source 1..1800: mol_type = unassigned DNA
acggctcctggaaagaagagaccgttgattgaatccccccagcagcccgactcctccacgggtatcggcaaaaaaggcaagcagccggctaaaaagaagctcgttttcgaagacgaaactggagcaggcgacggaccccctgagggatcaacttccggagccatgtctgatgacagtgagatgcgtgcagcagctggcggagctgcagtcgagggsggacaaggtgccgatggagtgggtaatgcctcgggtgattggcattgcgattccacctggtctgagggccacgtcacgaccaccagcaccagaacctgggtcttgcccacctacaacaaccacctntacaagcgactcggagagagcctgcagtccaacacctacaacggattctccaccccctggggatactttgacttcaaccgcttccactgccacttctcaccacgtgactggcagcgactcatcaacaacaactggggcatgcgacccaaagccatgcgggtcaaaatcttcaacatccaggtcaaggaggtcacgacgtcgaacggcgagacaacggtggctaataaccttaccagcacggttcagatctttgcggactcgtcgtacgaactgccgtacgtgatggatgcgggtcaagagggcagcctgcctccttttcccaacgacgtctttatggtgccccagtacggctactgtggactggtgaccggcaacacttcgcagcaacagactgacagaaatgccttctactgcctggagtactttccttcgcagatgctgcggactggcaacaactttgaaattacgtacagttttgagaaggtgcctttccactcgatgtacgcgcacagccagagcctggaccggctgatgaaccctctcatcgaccagtacctgtggggactgcaatcgaccaccaccggaaccaccctgaatgccgggactgccaccaccaactttaccaagctgcggcctaccaacttttccaactttaaaaagaactggctgcccgggccttcaatcaagcagcagggcttctcaaagactgccaatcaaaactacaagatccctgccaccgggtcagacagtctcatcaaatacgagacgcacagcactctggacggaagatggagtgccctgacccccggacctccaatggccacggctggacctgcggacagcaagttcagcaacagccagctcatctttgcggggcctaaacagaacggcaacacggccaccgtacccgggactctgatcttcacctctgaggaggagctggcagccaccaacgccaccgatacggacatgtggggcaacctacctggcggtgaccagagcaacagcaacctgccgaccgtggacagactgacagccttgggagccgtgcctggaatggtctggcaaaacagagacatttactaccagggtcccatttgggccaagattcctcataccgatggacactttcacccctcaccgctgattggtgggtttgggctgaaacacccgcctcctcaaatttttatcaagaacaccccggtacctgcgaatcctgcaacgaccttcagctctactccggtaaactccttcattactcagtacagcactggccaggtgtcggtgcagattgactgggagatccagaaggagcggtccaaacgctggaaccccgaggtccagtttacctccaactacggacagcaaaactctctgttgtgggctcccgatgcggctgggaaatacactgagcctagggctatcggtacccgctacctcacccaccacctgtaataa

SEQ ID NO: 54 - DNA, 2208 bp, Adeno-associated virus 4
  misc_difference 750: note = modified_base - a, c, t, or g
  source 1..2208: mol_type = unassigned DNA
atgactgacggttaccttccagattggctagaggacaacctctctgaaggcgttcgagagtggtgggcgctgcaacctggagcccctaaacccaaggcaaatcaacaacatcaggacaacgctcggggtcttgtgcttccgggttacaaatacctcggacccggcaacggactcgacaagggggaacccgtcaacgcagcggacgcggcagccctcgagcacgacaaggcctacgaccagcagctcaaggccggtgacaacccctacctcaagtacaaccacgccgacgcggagttccagcagcggcttcagggcgacacatcgtttgggggcaacctcggcagagcagtcttccaggccaaaaagagggttcttgaacctcttggtctggttgagcaagcgggtgagacggctcctggaaagaagagaccgttgattgaatccccccagcagcccgactcctccacgggtatcggcaaaaaaggcaagcagccggctaaaaagaagctcgttttcgaagacgaaactggagcaggcgacggaccccctgagggatcaacttccggagccatgtctgatgacagtgagatgcgtgcagcagctggcggagctgcagtcgagggsggacaaggtgccgatggagtgggtaatgcctcgggtgattggcattgcgattccacctggtctgagggccacgtcacgaccaccagcaccagaacctgggtcttgcccacctacaacaaccacctntacaagcgactcggagagagcctgcagtccaacacctacaacggattctccaccccctggggatactttgacttcaaccgcttccactgccacttctcaccacgtgactggcagcgactcatcaacaacaactggggcatgcgacccaaagccatgcgggtcaaaatcttcaacatccaggtcaaggaggtcacgacgtcgaacggcgagacaacggtggctaataaccttaccagcacggttcagatctttgcggactcgtcgtacgaactgccgtacgtgatggatgcgggtcaagagggcagcctgcctccttttcccaacgacgtctttatggtgccccagtacggctactgtggactggtgaccggcaacacttcgcagcaacagactgacagaaatgccttctactgcctggagtactttccttcgcagatgctgcggactggcaacaactttgaaattacgtacagttttgagaaggtgcctttccactcgatgtacgcgcacagccagagcctggaccggctgatgaaccctctcatcgaccagtacctgtggggactgcaatcgaccaccaccggaaccaccctgaatgccgggactgccaccaccaactttaccaagctgcggcctaccaacttttccaactttaaaaagaactggctgcccgggccttcaatcaagcagcagggcttctcaaagactgccaatcaaaactacaagatccctgccaccgggtcagacagtctcatcaaatacgagacgcacagcactctggacggaagatggagtgccctgacccccggacctccaatggccacggctggacctgcggacagcaagttcagcaacagccagctcatctttgcggggcctaaacagaacggcaacacggccaccgtacccgggactctgatcttcacctctgaggaggagctggcagccaccaacgccaccgatacggacatgtggggcaacctacctggcggtgaccagagcaacagcaacctgccgaccgtggacagactgacagccttgggagccgtgcctggaatggtctggcaaaacagagacatttactaccagggtcccatttgggccaagattcctcataccgatggacactttcacccctcaccgctgattggtgggtttgggctgaaacacccgcctcctcaaatttttatcaagaacaccccggtacctgcgaatcctgcaacgaccttcagctctactccggtaaactccttcattactcagtacagcactggccaggtgtcggtgcagattgactgggagatccagaaggagcggtccaaacgctggaaccccgaggtccagtttacctccaactacggacagcaaaactctctgttgtgggctcccgatgcggctgggaaatacactgagcctagggctatcggtacccgctacctcacccaccacctgtaataa

SEQ ID NO: 55 - DNA, 1872 bp, Adeno-associated virus 4
  source 1..1872: mol_type = unassigned DNA
atgccggggttctacgagatcgtgctgaaggtgcccagcgacctggacgagcacctgcccggcatttctgactcttttgtgagctgggtggccgagaaggaatgggagctgccgccggattctgacatggacttgaatctgattgagcaggcacccctgaccgtggccgaaaagctgcaacgcgagttcctggtcgagtggcgccgcgtgagtaaggccccggaggccctcttctttgtccagttcgagaagggggacagctacttccacctgcacatcctggtggagaccgtgggcgtcaaatccatggtggtgggccgctacgtgagccagattaaagagaagctggtgacccgcatctaccgcggggtcgagccgcagcttccgaactggttcgcggtgaccaagacgcgtaatggcgccggaggcgggaacaaggtggtggacgactgctacatccccaactacctgctccccaagacccagcccgagctccagtgggcgtggactaacatggaccagtatataagcgcctgtttgaatctcgcggagcgtaaacggctggtggcgcagcatctgacgcacgtgtcgcagacgcaggagcagaacaaggaaaaccagaaccccaattctgacgcgccggtcatcaggtcaaaaacctccgccaggtacatggagctggtcgggtggctggtggaccgcgggatcacgtcagaaaagcaatggatccaggaggaccaggcgtcctacatctccttcaacgccgcctccaactcgcggtcacaaatcaaggccgcgctggacaatgcctccaaaatcatgagcctgacaaagacggctccggactacctggtgggccagaacccgccggaggacatttccagcaaccgcatctaccgaatcctcgagatgaacgggtacgatccgcagtacgcggcctccgtcttcctgggctgggcgcaaaagaagttcgggaagaggaacaccatctggctctttgggccggccacgacgggtaaaaccaacatcgcggaagccatcgcccacgccgtgcccttctacggctgcgtgaactggaccaatgagaactttccgttcaacgattgcgtcgacaagatggtgatctggtgggaggagggcaagatgacggccaaggtcgtagagagcgccaaggccatcctgggcggaagcaaggtgcgcgtggaccaaaagtgcaagtcatcggcccagatcgacccaactcccgtgatcgtcacctccaacaccaacatgtgcgcggtcatcgacggaaactcgaccaccttcgagcaccaacaaccactccaggaccggatgttcaagttcgagctcaccaagcgcctggagcacgactttggcaaggtcaccaagcaggaagtcaaagactttttccggtgggcgtcagatcacgtgaccgaggtgactcacgagttttacgtcagaaagggtggagctagaaagaggcccgcccccaatgacgcagatataagtgagcccaagcgggcctgtccgtcagttgcgcagccatcgacgtcagacgcggaagctccggtggactacgcggacaggtaccaaaacaaatgttctcgtcacgtgggtatgaatctgatgctttttccctgccggcaatgcgagagaatgaatcagaatgtggacatttgcttcacgcacggggtcatggactgtgccgagtgcttccccgtgtcagaatctcaacccgtgtctgtcgtcagaaagcggacgtatcagaaactgtgtccgattcatcacatcatggggagggcgcccgaggtggcctgctcggcctgcgaactggccaatgtggacttggatgactgtgacatggaacaataa

SEQ ID NO: 56 - DNA, 1611 bp, Adeno-associated virus 4
  source 1..1611: mol_type = unassigned DNA
atgccggggttctacgagatcgtgctgaaggtgcccagcgacctggacgagcacctgcccggcatttctgactcttttgtgagctgggtggccgagaaggaatgggagctgccgccggattctgacatggacttgaatctgattgagcaggcacccctgaccgtggccgaaaagctgcaacgcgagttcctggtcgagtggcgccgcgtgagtaaggccccggaggccctcttctttgtccagttcgagaagggggacagctacttccacctgcacatcctggtggagaccgtgggcgtcaaatccatggtggtgggccgctacgtgagccagattaaagagaagctggtgacccgcatctaccgcggggtcgagccgcagcttccgaactggttcgcggtgaccaagacgcgtaatggcgccggaggcgggaacaaggtggtggacgactgctacatccccaactacctgctccccaagacccagcccgagctccagtgggcgtggactaacatggaccagtatataagcgcctgtttgaatctcgcggagcgtaaacggctggtggcgcagcatctgacgcacgtgtcgcagacgcaggagcagaacaaggaaaaccagaaccccaattctgacgcgccggtcatcaggtcaaaaacctccgccaggtacatggagctggtcgggtggctggtggaccgcgggatcacgtcagaaaagcaatggatccaggaggaccaggcgtcctacatctccttcaacgccgcctccaactcgcggtcacaaatcaaggccgcgctggacaatgcctccaaaatcatgagcctgacaaagacggctccggactacctggtgggccagaacccgccggaggacatttccagcaaccgcatctaccgaatcctcgagatgaacgggtacgatccgcagtacgcggcctccgtcttcctgggctgggcgcaaaagaagttcgggaagaggaacaccatctggctctttgggccggccacgacgggtaaaaccaacatcgcggaagccatcgcccacgccgtgcccttctacggctgcgtgaactggaccaatgagaactttccgttcaacgattgcgtcgacaagatggtgatctggtgggaggagggcaagatgacggccaaggtcgtagagagcgccaaggccatcctgggcggaagcaaggtgcgcgtggaccaaaagtgcaagtcatcggcccagatcgacccaactcccgtgatcgtcacctccaacaccaacatgtgcgcggtcatcgacggaaactcgaccaccttcgagcaccaacaaccactccaggaccggatgttcaagttcgagctcaccaagcgcctggagcacgactttggcaaggtcaccaagcaggaagtcaaagactttttccggtgggcgtcagatcacgtgaccgaggtgactcacgagttttacgtcagaaagggtggagctagaaagaggcccgcccccaatgacgcagatataagtgagcccaagcgggcctgtccgtcagttgcgcagccatcgacgtcagacgcggaagctccggtggactacgcggacagattggctagaggacaacctctctga

SEQ ID NO: 57 - DNA, 1872 bp, Adeno-associated virus 4; identical to SEQ ID NO: 55
  source 1..1872: mol_type = unassigned DNA

SEQ ID NO: 58 - DNA, 1617 bp, Adeno-associated virus 4
  misc_difference 162: note = modified_base - a, c, t, or g
  source 1..1617: mol_type = unassigned DNA
atgcgtgcagcagctggcggagctgcagtcgagggsggacaaggtgccgatggagtgggtaatgcctcgggtgattggcattgcgattccacctggtctgagggccacgtcacgaccaccagcaccagaacctgggtcttgcccacctacaacaaccacctntacaagcgactcggagagagcctgcagtccaacacctacaacggattctccaccccctggggatactttgacttcaaccgcttccactgccacttctcaccacgtgactggcagcgactcatcaacaacaactggggcatgcgacccaaagccatgcgggtcaaaatcttcaacatccaggtcaaggaggtcacgacgtcgaacggcgagacaacggtggctaataaccttaccagcacggttcagatctttgcggactcgtcgtacgaactgccgtacgtgatggatgcgggtcaagagggcagcctgcctccttttcccaacgacgtctttatggtgccccagtacggctactgtggactggtgaccggcaacacttcgcagcaacagactgacagaaatgccttctactgcctggagtactttccttcgcagatgctgcggactggcaacaactttgaaattacgtacagttttgagaaggtgcctttccactcgatgtacgcgcacagccagagcctggaccggctgatgaaccctctcatcgaccagtacctgtggggactgcaatcgaccaccaccggaaccaccctgaatgccgggactgccaccaccaactttaccaagctgcggcctaccaacttttccaactttaaaaagaactggctgcccgggccttcaatcaagcagcagggcttctcaaagactgccaatcaaaactacaagatccctgccaccgggtcagacagtctcatcaaatacgagacgcacagcactctggacggaagatggagtgccctgacccccggacctccaatggccacggctggacctgcggacagcaagttcagcaacagccagctcatctttgcggggcctaaacagaacggcaacacggccaccgtacccgggactctgatcttcacctctgaggaggagctggcagccaccaacgccaccgatacggacatgtggggcaacctacctggcggtgaccagagcaacagcaacctgccgaccgtggacagactgacagccttgggagccgtgcctggaatggtctggcaaaacagagacatttactaccagggtcccatttgggccaagattcctcataccgatggacactttcacccctcaccgctgattggtgggtttgggctgaaacacccgcctcctcaaatttttatcaagaacaccccggtacctgcgaatcctgcaacgaccttcagctctactccggtaaactccttcattactcagtacagcactggccaggtgtcggtgcagattgactgggagatccagaaggagcggtccaaacgctggaaccccgaggtccagtttacctccaactacggacagcaaaactctctgttgtgggctcccgatgcggctgggaaatacactgagcctagggctatcggtacccgctacctcacccaccacctgtaa

SEQ ID NO: 59 - DNA, 939 bp, Adeno-associated virus 4
  source 1..939: mol_type = unassigned DNA
atggagctggtcgggtggctggtggaccgcgggatcacgtcagaaaagcaatggatccaggaggaccaggcgtcctacatctccttcaacgccgcctccaactcgcggtcacaaatcaaggccgcgctggacaatgcctccaaaatcatgagcctgacaaagacggctccggactacctggtgggccagaacccgccggaggacatttccagcaaccgcatctaccgaatcctcgagatgaacgggtacgatccgcagtacgcggcctccgtcttcctgggctgggcgcaaaagaagttcgggaagaggaacaccatctggctctttgggccggccacgacgggtaaaaccaacatcgcggaagccatcgcccacgccgtgcccttctacggctgcgtgaactggaccaatgagaactttccgttcaacgattgcgtcgacaagatggtgatctggtgggaggagggcaagatgacggccaaggtcgtagagagcgccaaggccatcctgggcggaagcaaggtgcgcgtggaccaaaagtgcaagtcatcggcccagatcgacccaactcccgtgatcgtcacctccaacaccaacatgtgcgcggtcatcgacggaaactcgaccaccttcgagcaccaacaaccactccaggaccggatgttcaagttcgagctcaccaagcgcctggagcacgactttggcaaggtcaccaagcaggaagtcaaagactttttccggtgggcgtcagatcacgtgaccgaggtgactcacgagttttacgtcagaaagggtggagctagaaagaggcccgcccccaatgacgcagatataagtgagcccaagcgggcctgtccgtcagttgcgcagccatcgacgtcagacgcggaagctccggtggactacgcggacagattggctagaggacaacctctctga

SEQ ID NO: 60 - DNA, 1197 bp, Adeno-associated virus 4
  source 1..1197: mol_type = unassigned DNA
atggagctggtcgggtggctggtggaccgcgggatcacgtcagaaaagcaatggatccaggaggaccaggcgtcctacatctccttcaacgccgcctccaactcgcggtcacaaatcaaggccgcgctggacaatgcctccaaaatcatgagcctgacaaagacggctccggactacctggtgggccagaacccgccggaggacatttccagcaaccgcatctaccgaatcctcgagatgaacgggtacgatccgcagtacgcggcctccgtcttcctgggctgggcgcaaaagaagttcgggaagaggaacaccatctggctctttgggccggccacgacgggtaaaaccaacatcgcggaagccatcgcccacgccgtgcccttctacggctgcgtgaactggaccaatgagaactttccgttcaacgattgcgtcgacaagatggtgatctggtgggaggagggcaagatgacggccaaggtcgtagagagcgccaaggccatcctgggcggaagcaaggtgcgcgtggaccaaaagtgcaagtcatcggcccagatcgacccaactcccgtgatcgtcacctccaacaccaacatgtgcgcggtcatcgacggaaactcgaccaccttcgagcaccaacaaccactccaggaccggatgttcaagttcgagctcaccaagcgcctggagcacgactttggcaaggtcaccaagcaggaagtcaaagactttttccggtgggcgtcagatcacgtgaccgaggtgactcacgagttttacgtcagaaagggtggagctagaaagaggcccgcccccaatgacgcagatataagtgagcccaagcgggcctgtccgtcagttgcgcagccatcgacgtcagacgcggaagctccggtggactacgcggacaggtaccaaaacaaatgttctcgtcacgtgggtatgaatctgatgctttttccctgccggcaatgcgagagaatgaatcagaatgtggacatttgcttcacgcacggggtcatggactgtgccgagtgcttccccgtgtcagaatctcaacccgtgtctgtcgtcagaaagcggacgtatcagaaactgtgtccgattcatcacatcatggggagggcgcccgaggtggcctgctcggcctgcgaactggccaatgtggacttggatgactgtgacatggaacaa

SEQ ID NO: 61 - DNA, 245 bp, Adeno-associated virus 4
  source 1..245: mol_type = unassigned DNA
ctccatcatctaggtttgcccactgacgtcaatgtgacgtcctagggttagggaggtccctgtattagcagtcacgtgagtgtcgtatttcgcggagcgtagcggagcgcataccaagctgccacgtcacagccacgtggtccgtttgcgacagtttgcgacaccatgtggtcaggagggtatataaccgcgagtgagccagcgaggagctccattttgcccgcgaattttgaacgagcagcagc

SEQ ID NO: 62 - protein, 313 aa, Adeno-associated virus 4
  VARIANT 313: note = MOD_RES - Any amino acid
MELVGWLVDRGITSEKQWIQEDQASYISFNAASNSRSQIKAALDNASKIMSLTKTAPDYLVGQNPPEDISSNRIYRILEMNGYDPQYAASVFLGWAQKKFGKRNTIWLFGPATTGKTNIAEAIAHAVPFYGCVNWTNENFPFNDCVDKMVIWWEEGKMTAKVVESAKAILGGSKVRVDQKCKSSAQIDPTPVIVTSNTNMCAVIDGNSTTFEHQQPLQDRMFKFELTKRLEHDFGKVTKQEVKDFFRWASDHVTEVTHEFYVRKGGARKRPAPNDADISEPKRACPSVAQPSTSDAEAPVDYADRLARGQPLX

SEQ ID NO: 63 - protein, 399 aa, Adeno-associated virus 4
MELVGWLVDRGITSEKQWIQEDQASYISFNAASNSRSQIKAALDNASKIMSLTKTAPDYLVGQNPPEDISSNRIYRILEMNGYDPQYAASVFLGWAQKKFGKRNTIWLFGPATTGKTNIAEAIAHAVPFYGCVNWTNENFPFNDCVDKMVIWWEEGKMTAKVVESAKAILGGSKVRVDQKCKSSAQIDPTPVIVTSNTNMCAVIDGNSTTFEHQQPLQDRMFKFELTKRLEHDFGKVTKQEVKDFFRWASDHVTEVTHEFYVRKGGARKRPAPNDADISEPKRACPSVAQPSTSDAEAPVDYADRYQNKCSRHVGMNLMLFPCRQCERMNQNVDICFTHGVMDCAECFPVSESQPVSVVRKRTYQKLCPIHHIMGRAPEVACSACELANVDLDDCDMEQ

SEQ ID NO: 64 - protein, 623 aa, Adeno-associated virus 4
MPGFYEIVLKVPSDLDEHLPGISDSFVSWVAEKEWELPPDSDMDLNLIEQAPLTVAEKLQREFLVEWRRVSKAPEALFFVQFEKGDSYFHLHILVETVGVKSMVVGRYVSQIKEKLVTRIYRGVEPQLPNWFAVTKTRNGAGGGNKVVDDCYIPNYLLPKTQPELQWAWTNMDQYISACLNLAERKRLVAQHLTHVSQTQEQNKENQNPNSDAPVIRSKTSARYMELVGWLVDRGITSEKQWIQEDQASYISFNAASNSRSQIKAALDNASKIMSLTKTAPDYLVGQNPPEDISSNRIYRILEMNGYDPQYAASVFLGWAQKKFGKRNTIWLFGPATTGKTNIAEAIAHAVPFYGCVNWTNENFPFNDCVDKMVIWWEEGKMTAKVVESAKAILGGSKVRVDQKCKSSAQIDPTPVIVTSNTNMCAVIDGNSTTFEHQQPLQDRMFKFELTKRLEHDFGKVTKQEVKDFFRWASDHVTEVTHEFYVRKGGARKRPAPNDADISEPKRACPSVAQPSTSDAEAPVDYADRYQNKCSRHVGMNLMLFPCRQCERMNQNVDICFTHGVMDCAECFPVSESQPVSVVRKRTYQKLCPIHHIMGRAPEVACSACELANVDLDDCDMEQ

SEQ ID NO: 65 - protein, 537 aa, Adeno-associated virus 4
  VARIANT 537: note = MOD_RES - Any amino acid
MPGFYEIVLKVPSDLDEHLPGISDSFVSWVAEKEWELPPDSDMDLNLIEQAPLTVAEKLQREFLVEWRRVSKAPEALFFVQFEKGDSYFHLHILVETVGVKSMVVGRYVSQIKEKLVTRIYRGVEPQLPNWFAVTKTRNGAGGGNKVVDDCYIPNYLLPKTQPELQWAWTNMDQYISACLNLAERKRLVAQHLTHVSQTQEQNKENQNPNSDAPVIRSKTSARYMELVGWLVDRGITSEKQWIQEDQASYISFNAASNSRSQIKAALDNASKIMSLTKTAPDYLVGQNPPEDISSNRIYRILEMNGYDPQYAASVFLGWAQKKFGKRNTIWLFGPATTGKTNIAEAIAHAVPFYGCVNWTNENFPFNDCVDKMVIWWEEGKMTAKVVESAKAILGGSKVRVDQKCKSSAQIDPTPVIVTSNTNMCAVIDGNSTTFEHQQPLQDRMFKFELTKRLEHDFGKVTKQEVKDFFRWASDHVTEVTHEFYVRKGGARKRPAPNDADISEPKRACPSVAQPSTSDAEAPVDYADRLARGQPLX

SEQ ID NO: 66 - protein, 623 aa, Adeno-associated virus 4; identical to SEQ ID NO: 64

SEQ ID NO: 67 - protein, 544 aa, Adeno-associated virus 4
MSDDSEMRAAAGGAAVEGGQGADGVGNASGDWHCDSTWSEGHVTTTSTRTWVLPTYNNHLYKRLGESLQSNTYNGFSTPWGYFDFNRFHCHFSPRDWQRLINNNWGMRPKAMRVKIFNIQVKEVTTSNGETTVANNLTSTVQIFADSSYELPYVMDAGQEGSLPPFPNDVFMVPQYGYCGLVTGNTSQQQTDRNAFYCLEYFPSQMLRTGNNFEITYSFEKVPFHSMYAHSQSLDRLMNPLIDQYLWGLQSTTTGTTLNAGTATTNFTKLRPTNFSNFKKNWLPGPSIKQQGFSKTANQNYKIPATGSDSLIKYETHSTLDGRWSALTPGPPMATAGPADSKFSNSQLIFAGPKQNGNTATVPGTLIFTSEEELAATNATDTDMWGNLPGGDQSNSNLPTVDRLTALGAVPGMVWQNRDIYYQGPIWAKIPHTDGHFHPSPLIGGFGLKHPPPQIFIKNTPVPANPATTFSSTPVNSFITQYSTGQVSVQIDWEIQKERSKRWNPEVQFTSNYGQQNSLLWAPDAAGKYTEPRAIGTRYLTHHL

SEQ ID NO: 68 - protein, 734 aa, Adeno-associated virus 4
MTDGYLPDWLEDNLSEGVREWWALQPGAPKPKANQQHQDNARGLVLPGYKYLGPGNGLDKGEPVNAADAAALEHDKAYDQQLKAGDNPYLKYNHADAEFQQRLQGDTSFGGNLGRAVFQAKKRVLEPLGLVEQAGETAPGKKRPLIESPQQPDSSTGIGKKGKQPAKKKLVFEDETGAGDGPPEGSTSGAMSDDSEMRAAAGGAAVEGGQGADGVGNASGDWHCDSTWSEGHVTTTSTRTWVLPTYNNHLYKRLGESLQSNTYNGFSTPWGYFDFNRFHCHFSPRDWQRLINNNWGMRPKAMRVKIFNIQVKEVTTSNGETTVANNLTSTVQIFADSSYELPYVMDAGQEGSLPPFPNDVFMVPQYGYCGLVTGNTSQQQTDRNAFYCLEYFPSQMLRTGNNFEITYSFEKVPFHSMYAHSQSLDRLMNPLIDQYLWGLQSTTTGTTLNAGTATTNFTKLRPTNFSNFKKNWLPGPSIKQQGFSKTANQNYKIPATGSDSLIKYETHSTLDGRWSALTPGPPMATAGPADSKFSNSQLIFAGPKQNGNTATVPGTLIFTSEEELAATNATDTDMWGNLPGGDQSNSNLPTVDRLTALGAVPGMVWQNRDIYYQGPIWAKIPHTDGHFHPSPLIGGFGLKHPPPQIFIKNTPVPANPATTFSSTPVNSFITQYSTGQVSVQIDWEIQKERSKRWNPEVQFTSNYGQQNSLLWAPDAAGKYTEPRAIGTRYLTHHL

SEQ ID NO: 69 - protein, 598 aa, Adeno-associated virus 4
TAPGKKRPLIESPQQPDSSTGIGKKGKQPAKKKLVFEDETGAGDGPPEGSTSGAMSDDSEMRAAAGGAAVEGGQGADGVGNASGDWHCDSTWSEGHVTTTSTRTWVLPTYNNHLYKRLGESLQSNTYNGFSTPWGYFDFNRFHCHFSPRDWQRLINNNWGMRPKAMRVKIFNIQVKEVTTSNGETTVANNLTSTVQIFADSSYELPYVMDAGQEGSLPPFPNDVFMVPQYGYCGLVTGNTSQQQTDRNAFYCLEYFPSQMLRTGNNFEITYSFEKVPFHSMYAHSQSLDRLMNPLIDQYLWGLQSTTTGTTLNAGTATTNFTKLRPTNFSNFKKNWLPGPSIKQQGFSKTANQNYKIPATGSDSLIKYETHSTLDGRWSALTPGPPMATAGPADSKFSNSQLIFAGPKQNGNTATVPGTLIFTSEEELAATNATDTDMWGNLPGGDQSNSNLPTVDRLTALGAVPGMVWQNRDIYYQGPIWAKIPHTDGHFHPSPLIGGFGLKHPPPQIFIKNTPVPANPATTFSSTPVNSFITQYSTGQVSVQIDWEIQKERSKRWNPEVQFTSNYGQQNSLLWAPDAAGKYTEPRAIGTRYLTHHL

SEQ ID NO: 70 - DNA, 129 bp, Adeno-associated virus 4
  source 1..129: mol_type = unassigned DNA
ttggccactccctctatgcgcgctcgctcactcactcggccctgcggccagaggccggcagtctggagacctttggtgtccagggcagggccgagtgagtgagcgagcgcgcatagagggagtggccaa

SEQ ID NO: 71 - DNA, 125 bp, Adeno-associated virus 4
  source 1..125: mol_type = unassigned DNA
ttggccactccctctatgcgcgctcgctcactcactcggccctggagaccaaaggtctccagactgccggcctctggccggcagggccgagtgagtgagcgagcgcgcatagagggagtggccaa

SEQ ID NO: 72 - DNA, 4768 bp, Adeno-associated virus 4
  misc_difference 3009: note = modified_base - a, c, t, or g
  source 1..4768: mol_type = unassigned DNA
ttggccactccctctatgcgcgctcgctcactcactcggccctggagaccaaaggtctccagactgccggcctctggccggcagggccgagtgagtgagcgagcgcgcatagagggagtggccaactccatcatctaggtttgcccactgacgtcaatgtgacgtcctagggttagggaggtccctgtattagcagtcacgtgagtgtcgtatttcgcggagcgtagcggagcgcataccaagctgccacgtcacagccacgtggtccgtttgcgacagtttgcgacaccatgtggtcaggagggtatataaccgcgagtgagccagcgaggagctccattttgcccgcgaattttgaacgagcagcagccatgccggggttctacgagatcgtgctgaaggtgcccagcgacctggacgagcacctgcccggcatttctgactcttttgtgagctgggtggccgagaaggaatgggagctgccgccggattctgacatggacttgaatctgattgagcaggcacccctgaccgtggccgaaaagctgcaacgcgagttcctggtcgagtggcgccgcgtgagtaaggccccggaggccctcttctttgtccagttcgagaagggggacagctacttccacctgcacatcctggtggagaccgtgggcgtcaaatccatggtggtgggccgctacgtgagccagattaaagagaagctggtgacccgcatctaccgcggggtcgagccgcagcttccgaactggttcgcggtgaccaagacgcgtaatggcgccggaggcgggaacaaggtggtggacgactgctacatccccaactacctgctccccaagacccagcccgagctccagtgggcgtggactaacatggaccagtatataagcgcctgtttgaatctcgcggagcgtaaacggctggtggcgcagcatctgacgcacgtgtcgcagacgcaggagcagaacaaggaaaaccagaaccccaattctgacgcgccggtcatcaggtcaaaaacctccgccaggtacatggagctggtcgggtggctggtggaccgcgggatcacgtcagaaaagcaatggatccaggaggaccaggcgtcctacatctccttcaacgccgcctccaactcgcggtcacaaatcaaggccgcgctggacaatgcctccaaaatcatgagcctgacaaagacggctccggactacctggtgggccagaacccgccggaggacatttccagcaaccgcatctaccgaatcctcgagatgaacgggtacgatccgcagtacgcggcctccgtcttcctgggctgggcgcaaaagaagttcgggaagaggaacaccatctggctctttgggccggccacgacgggtaaaaccaacatcgcggaagccatcgcccacgccgtgcccttctacggctgcgtgaactggaccaatgagaactttccgttcaacgattgcgtcgacaagatggtgatctggtgggaggagggcaagatgacggccaaggtcgtagagagcgccaaggccatcctgggcggaagcaaggtgcgcgtggaccaaaagtgcaagtcatcggcccagatcgacccaactcccgtgatcgtcacctccaacaccaacatgtgcgcggtcatcgacggaaactcgaccaccttcgagcaccaacaaccactccaggaccggatgttcaagttcgagctcaccaagcgcctggagcacgactttggcaaggtcaccaagcaggaagtcaaagactttttccggtgggcgtcagatcacgtgaccgaggtgactcacgagttttacgtcagaaagggtggagctagaaagaggcccgcccccaatgacgcagatataagtgagcccaagcgggcctgtccgtcagttgcgcagccatcgacgtcagacgcggaagctccggtggactacgcggacaggtaccaaaacaaatgttctcgtcacgtgggtatgaatctgatgctttttccctgccggcaatgcgagagaatgaatcagaatgtggacatttgcttcacgcacggggtcatggactgtgccgagtgcttccccgtgtcagaatctcaacccgtgtctgtcgtcagaaagcggacgtatcagaaactgtgtccgattcatcacatcatggggagggcgcccgaggtggcctgctcggcctgcgaactggccaatgtggacttggatgactgtgacatggaacaataaatgactcaaaccagatatgactgacggttaccttccagattggctagaggacaacctctctgaaggcgttcgagagtggtgggcgctgcaacctggagcccctaaacccaaggcaaatcaacaacatcaggacaacgctcggggtcttgtgcttccgggttacaaatacctcggacccggcaacggactcgacaagggggaacccgtcaacgcagcggacgcggcagccctcgagcacgacaaggcctacgaccagcagctcaaggccggtgacaacccctacctcaagtacaaccacgccgacgcggagttccagcagcggcttcagggcgacacaccgtttgggggcaacctcggcagagcagtcttccaggccaaaaagagggttcttgaacctcttggtctggttgagcaagcgggtgagacggctcctggaaagaagagaccgttgattgaatccccccagcagcccgactcctccacgggtatcggcaaaaaaggcaagcagccggctaaaaagaagctcgttttcgaagacgaaactggagcaggcgacggaccccctgagggatcaacttccggagccatgtctgatgacagtgagatgcgtgcagcagctggcggagctgcagtcgagggsggacaaggtgccgatggagtgggtaatgcctcgggtgattggcattgcgattccacctggtctgagggccacgtcacgaccaccagcaccagaacctgggtcttgcccacctacaacaaccacctntacaagcgactcggagagagcctgcagtccaacacctacaacggattctccaccccctggggatactttgacttcaaccgcttccactgccacttctcaccacgtgactggcagcgactcatcaacaacaactggggcatgcgacccaaagccatgcgggtcaaaatcttcaacatccaggtcaaggaggtcacgacgtcgaacggcgagacaacggtggctaataaccttaccagcacggttcagatctttgcggactcgtcgtacgaactgccgtacgtgatggatgcgggtcaagagggcagcctgcctccttttcccaacgacgtctttatggtgccccagtacggctactgtggactggtgaccggcaacacttcgcagcaacagactgacagaaatgccttctactgcctggagtactttccttcgcagatgctgcggactggcaacaactttgaaattacgtacagttttgagaaggtgcctttccactcgatgtacgcgcacagccagagcctggaccggctgatgaaccctctcatcgaccagtacctgtggggactgcaatcgaccaccaccggaaccaccctgaatgccgggactgccaccaccaactttaccaagctgcggcctaccaacttttccaactttaaaaagaactggctgcccgggccttcaatcaagcagcagggcttctcaaagactgccaatcaaaactacaagatccctgccaccgggtcagacagtctcatcaaatacgagacgcacagcactctggacggaagatggagtgccctgacccccggacctccaatggccacggctggacctgcggacagcaagttcagcaacagccagctcatctttgcggggcctaaacagaacggcaacacggccaccgtacccgggactctgatcttcacctctgaggaggagctggcagccaccaacgccaccgatacggacatgtggggcaacctacctggcggtgaccagagcaacagcaacctgccgaccgtggacagactgacagccttgggagccgtgcctggaatggtctggcaaaacagagacatttactaccagggtcccatttgggccaagattcctcataccgatggacactttcacccctcaccgctgattggtgggtttgggctgaaacacccgcctcctcaaatttttatcaagaacaccccggtacctgcgaatcctgcaacgaccttcagctctactccggtaaactccttcattactcagtacagcactggccaggtgtcggtgcagattgactgggagatccagaaggagcggtccaaacgctggaaccccgaggtccagtttacctccaactacggacagcaaaactctctgttgtgggctcccgatgcggctgggaaatacactgagcctagggctatcggtacccgctacctcacccaccacctgtaataacctgttaatcaataaaccggtttattcgtttcagttgaactttggtctccgtgtccttcttatcttatctcgtttccatggctactgcgtacataagcagcggcctgcggcgcttgcgcttcgcggtttacaactgccggttaatcagtaacttctggcaaaccatgatgatggagttggccactccctctatgcgcgctcgctcactcactcggccctggagaccaaaggtctccagactgccggcctctggccggcagggccgagtgagtgagcgagcgcgcatagagggagtggccaa

SEQ ID NO: 73 - DNA, 3098 bp, synthetic construct
  misc_feature 1..3098: note = source = /note="Description of Artificial Sequence: Synthetic polynucleotide"
  source 1..3098: mol_type = other DNA
gaattcgccctttctacggctgcgtcaactggaccaatgagaactttcccttcaacgattgcgtcgacaagatggtgatctggtgggaggagggcaagatgacggccaaggtcgtggagtccgccaaggccattctcggcggcagcaaggtgcgcgtggaccaaaagtgcaagtcttccgcccagatcgatcccacccccgtgatcgtcacttccaacaccaacatgtgcgctgtgattgacgggaacagcaccaccttcgagcaccagcagccgttacaagaccggatgttcaaatttgaactcacccgccgtctggagcacgactttggcaaggtgacaaagcaggaagtcaaagagttcttccgctgggcgcaggatcacgtgaccgaggtggcgcatgagttctacgtcagaaagggtggagccaacaagagacccgcccccgatgacgcggataaaagcgagcccaagcgggcctgcccctcagtcgcggatccatcgacgtcagacgcggaaggagctccggtggactttgccgacaggtaccaaaacaaatgttctcgtcacgcgggcatgcttcagatgctgtttccctgcaagacatgcgagagaatgaatcagaatttcaacatttgcttcacgcacgggaccagagactgttcagaatgtttccccggcgtgtcagaatctcaaccggtcgtcagaaagaggacgtatcggaaactctgtgccattcatcatctgctggggcgggctcccgagattgcttgctcggcctgcgatctggtcaacgtggacctggatgaccgtgtttctgagcaataaatgacttaaaccaggtatggctgccgatggttatcttccagattggctcgaggacaacctctctgagggcattcgcgagtggtgggacttgaaacctggagccccgaaacccaaagccaaccagcaaaagcaggacgacggccggggtctggtgcttcctggctacaagtacctcggacccttcaacggactcgacaagggagagccggtcaacgaggcagacgccgcggccctcgagcacgacaaggcctacgacaagcagctcgagcagggggacaacccgtacctcaagtacaaccacgccgacgccgagtttcaggagcgtcttcaagaagatacgtcttttgggggcaacctcgggcgagcagtcttccaggccaagaagcgggttctcgaacctctcggtctggttgaggaaggcgctaagacggctcctggaaagaagagacccatagaatcccccgactcctccacgggcatcggcaagaaaggccagcagcccgctaaaaagaagctcaactttgggcagactggcgactcagagtcagtgcccgacccccaacctctcggagaacctcccgccgcgccctcaggtctgggatctggtacaatggctgcaggcggtggcgcaccaatggcagacaataacgaaggcgccgacggagtgggtaatgcctccggaaattggcattgcgattccacatggctgggcgacagagtcatcaccaccagcacccgcacctgggccctgcccacctacaacaaccacctctacaagcagatatcaagtcagagcggggctaccaacgacaaccacttcttcggctacagcaccccctggggctattttgacttcaacagattccactgccacttctcaccacgtgactggcagcgactcatcaacaacaactggggattccggcccagaaagctgcggttcaagttgttcaacatccaggtcaaggaggtcacgacgaacgacggcgttacgaccatcgctaataaccttaccagcacgattcaggtcttctcggactcggagtaccaactgccgtacgtcctcggctctgcgcaccagggctgcctccctccgttccctgcggacgtgttcatgattcctcagtacggatatctgactctaaacaacggcagtcagtctgtgggacgttcctccttctactgcctggagtactttccttctcagatgctgagaacgggcaataactttgaattcagctacacctttgaggaagtgcctttccacagcagctatgcgcacagccagagcctggaccggctgatgaatcccctcatcgaccagtacctgtactacctggcccggacccagagcactacggggtccacaagggagctgcagttccatcaggctgggcccaacaccatggccgagcaatcaaagaactggctgcccggaccctgttatcggcagcagagactgtcaaaaaacatagacagcaacaacaacagtaactttgcctggaccggggccactaaataccatctgaatggtagaaattcattaaccaacccgggcgtagccatggccaccaacaaggacgacgaggaccagttctttcccatcaacggagtgctggtttttggcgaaacgggggctgccaacaagacaacgctggaaaacgtgctaatgaccagcgaggaggagatcaaaaccaccaatcccgtggctacagaagaatacggtgtggtctccagcaacctgcaatcgtctacggccggaccccagacacagactgtcaacagccagggggctctgcccggcatggtctggcagaaccgggacgtgtacctgcagggtcccatctgggccaaaattcctcacacggacggcaactttcacccgtctcccctgatgggcggatttggactcaaacacccgcctcctcaaattctcatcaaaaacaccccggtacctgctaatcctccagaggtgtttactcctgccaagtttgcctcatttatcacgcagtacagcaccggccaggtcagcgtggagatcgagtgggaactgcagaaagaaaacagcaaacgctggaatccagagattcagtacacctcaaattatgccaagtctaataatgtggaatttgctgtcaacaacgaaggggtttatactgagcctcgccccattggcacccgttacctcacccgtaacctgtaattgcctgttaatcaataaaccggttaattcgtttcagttgaactttggtctctgcgaagggcgaattc

SEQ ID NO: 74 - protein, 728 aa, synthetic construct
  REGION 1..728: note = source = /note="Description of Artificial Sequence: Synthetic polypeptide"
MAADGYLPDWLEDNLSEGIREWWDLKPGAPKPKANQQKQDDGRGLVLPGYKYLGPFNGLDKGEPVNEADAAALEHDKAYDKQLEQGDNPYLKYNHADAEFQERLQEDTSFGGNLGRAVFQAKKRVLEPLGLVEEGAKTAPGKKRPIESPDSSTGIGKKGQQPAKKKLNFGQTGDSESVPDPQPLGEPPAAPSGLGSGTMAAGGGAPMADNNEGADGVGNASGNWHCDSTWLGDRVITTSTRTWALPTYNNHLYKQISSQSGATNDNHFFGYSTPWGYFDFNRFHCHFSPRDWQRLINNNWGFRPRKLRFKLFNIQVKEVTTNDGVTTIANNLTSTIQVFSDSEYQLPYVLGSAHQGCLPPFPADVFMIPQYGYLTLNNGSQSVGRSSFYCLEYFPSQMLRTGNNFEFSYTFEEVPFHSSYAHSQSLDRLMNPLIDQYLYYLARTQSTTGSTRELQFHQAGPNTMAEQSKNWLPGPCYRQQRLSKNIDSNNNSNFAWTGATKYHLNGRNSLTNPGVAMATNKDDEDQFFPINGVLVFGETGAANKTTLENVLMTSEEEIKTTNPVATEEYGVVSSNLQSSTAGPQTQTVNSQGALPGMVWQNRDVYLQGPIWAKIPHTDGNFHPSPLMGGFGLKHPPPQILIKNTPVPANPPEVFTPAKFASFITQYSTGQVSVEIEWELQKENSKRWNPEIQYTSNYAKSNNVEFAVNNEGVYTEPRPIGTRYLTRNL

SEQ ID NO: 75 - DNA, 2495 bp, synthetic construct
  misc_feature 1..2495: note = source = /note="Description of Artificial Sequence: Synthetic polynucleotide"
  source 1..2495: mol_type = other DNA
gaattcgccctttctacggctgcgtcaactagaccaatgagaactttcccttcaacgattgcgtcgacaagatggtgatctggtgggaggagggcaagatgacggccaaggtcgtggagtccgccaaggccattcatcatctgctggggcgggctcccgagattgcttgctcggcctgcgatctggtcaacgtggacctggatgactgtgtttctgagcaataaatgacttaaaccaggtatggctgccgatggttatcttccagattggctcgaggacaacctctctgagggcattcgcgagtggtgggacttgaaacctggagccccgaaacccaaagccaaccagcaaaagcaggacgacggccggggtctggtgcttcctggctacaagtacctcggacccttcaacggactcgacaagggagagccggtcaacgaggcagacgccgcggccctcgagcacgacaaggcctacgacaagcagctcgagcagggggacaacccgtacctcaagtacaaccacgccgacgccgagtttcaggagcgtcttcaagaagatacgtcttttgggggcaacctcgggcgagcagtcttccaggccaagaagcgggttctcgaacctctcggtctggttgaggaaggcgctaagacggctcctggaaagaagagacccatagaatcccccgactcctccacgggcatcggcaagaaaggccagcagcccgctaaaaagaagctcaactttgggcagactggcgactcagagtcagtgcccgaccctcaaccaatcggagaaccccccgcaggcccctctggtctgggatctggtacaatggctgcaggcggtggcgctccaatggcagacaataacgaaggcgccgacggagtgggtaatgcctccggaaattggcattgcgattccacatggctgggcgacagagtcatcaccaccagcacccgcacctgggccctgcccacctacaacaaccacctctacaagcagatatcaagtcagagcggggctaccaacgacaaccacttcttcggctacagcaccccctggggctattttgacttcaacagattccactgccacttctcaccacgtgactggcagcgactcatcaacaacaactggggattccggcccagaaagctgcggttcaagttgttcaacatccaggtcaaggaggtcacgacgaacgacggcgttacgaccatcgctaataaccttaccagcacgattcaggtcttctcggactcggagtaccaactgccgtacgtcctcggctctgcgcaccagggctgcctccctccgttccctgcggacgtgttcatgattcctcagtacggatatctgactctaaacaacggcagtcagtctgtgggacgttcctccttctactgcctggagtactttccttctcagatgctgagaacgggcaataactttgaattcagctacacctttgaggaagtgcctttccacagcagctatgcgcacagccagagcctggaccggctgatgaatcccctcatcgaccagtacctgtactacctggcccggacccagagcactacggggtccacaagggagctgcagttccatcaggctgggcccaacaccatggccgagcaatcaaagaactggctgcccggaccctgttatcggcagcagagactgtcaaaaaacatagacagcaacaacaccagtaactttgcctggaccggggccactaaataccatctgaatggtagaaattcattaaccaacccgggcgtagccatggccaccaacaaggacgacgaggaccagttctttcccatcaacggagtgctggtttttggcaaaacgggggctgccaacaagacaacgctggaaaacgtgctaatgaccagcgaggaggagatcaaaaccaccaatcccgtggctacagaacagtacggtgtggtctccagcaacctgcaatcgtctacggccggaccccagacacagactgtcaacagccagggggctctgcccggcatggtctggcagaaccgggacgtgtacctgcagggtcccatctgggccaaaattcctcacacggacggcaactttcacccgtctcccctgatgggcggatttggactcaaacacccgcctcctcaaattctcatcaaaaacaccccggtacctgctaatcctccagaggtgtttactcctgccaagtttgcctcatttatcacgcagtacagcaccggccaggtcagcgtggagatcgagtgggaactgcagaaagaaaacagcaaacgctggaatccagagattcagtacacctcaaattatgccaagtctaataatgtggaatttgctgtcaacaacgaaggggtttatactgagcctcgccccattggcacccgttacctcacccgtaacctgtaattgcctgttaatcaataaaccggttaattcgtttcagttgaactttggtctctgcgaagggcgaattc

SEQ ID NO: 76 - protein, 728 aa, synthetic construct
  REGION 1..728: note = source = /note="Description of Artificial Sequence: Synthetic polypeptide"
MAADGYLPDWLEDNLSEGIREWWDLKPGAPKPKANQQKQDDGRGLVLPGYKYLGPFNGLDKGEPVNEADAAALEHDKAYDKQLEQGDNPYLKYNHADAEFQERLQEDTSFGGNLGRAVFQAKKRVLEPLGLVEEGAKTAPGKKRPIESPDSSTGIGKKGQQPAKKKLNFGQTGDSESVPDPQPIGEPPAGPSGLGSGTMAAGGGAPMADNNEGADGVGNASGNWHCDSTWLGDRVITTSTRTWALPTYNNHLYKQISSQSGATNDNHFFGYSTPWGYFDFNRFHCHFSPRDWQRLINNNWGFRPRKLRFKLFNIQVKEVTTNDGVTTIANNLTSTIQVFSDSEYQLPYVLGSAHQGCLPPFPADVFMIPQYGYLTLNNGSQSVGRSSFYCLEYFPSQMLRTGNNFEFSYTFEEVPFHSSYAHSQSLDRLMNPLIDQYLYYLARTQSTTGSTRELQFHQAGPNTMAEQSKNWLPGPCYRQQRLSKNIDSNNTSNFAWTGATKYHLNGRNSLTNPGVAMATNKDDEDQFFPINGVLVFGKTGAANKTTLENVLMTSEEEIKTTNPVATEQYGVVSSNLQSSTAGPQTQTVNSQGALPGMVWQNRDVYLQGPIWAKIPHTDGNFHPSPLMGGFGLKHPPPQILIKNTPVPANPPEVFTPAKFASFITQYSTGQVSVEIEWELQKENSKRWNPEIQYTSNYAKSNNVEFAVNNEGVYTEPRPIGTRYLTRNL

SEQ ID NO: 77 - DNA, 2504 bp, synthetic construct
  misc_feature 1..2504: note = source = /note="Description of Artificial Sequence: Synthetic polynucleotide"
  source 1..2504: mol_type = other DNA
gaattcgccctttctacggctgcgtcaactggaccaatgagaactttcccttcaacgattgcgtcgacaagatggtgatctggtgggaggagggcaagatgacggccaaggtcgtggagtccgccaaggccattcatcatctgctggggcgggctcccgagattgcttgctcggcctgcgatctggtcaacgtggacctggatgactgtgtttctgagcaataaatgacttaaaccaggtatggctgccgatggttatcttccagattggctcgaggacaacctctctgagggcattcgcgagtggtgggacttgaaacctggagccccgaaacccaaagccaaccagcaaaagcaggacgacggccggggtctggtgcttcctggctacaagtacctcggacccttcaacggactcgacaagggagagccggtcaacgaggcagacgccgcggccctcgagcacgacaaggcctacgacaagcagctcgagcagggggacaacccgtacctcaagtacaaccacgccgacgccgagtttcaggagcgtcttcaagaagatacgtcttttgggggcaacctcgggcgagcagtcttccaggccaagaagcgggttctcgaacctctcggtctggttgaggaaggcgctaagacggctcctggaaagaagagacccatagaatcccccgactcctccacgggcatcggcaagaaaggccagcagcccgctaaaaagaagctcaactttgggcagactggcgactcagagtcagtgcccgaccctcaaccaatcggagaaccccccgcaggcccctctggtctgggatctggtacaatggctgcaggcggtggcgctccaatggcagacaataacgaaggcgccgacggagtgggtaatgcctccggaaattggcattgcgattccacatggctgggcgacagagtcatcaccaccagcacccgcacctgggccctgcccacctacaacaaccacctctacaagcagatatcaagtcagagcggggctaccaacgacaaccacttcttcggctacagcaccccctggggctattttgacttcaacagattccactgccacttctcatcacgtgactggcagcgactcatcaacaacaactggggattccggcccaagagactcaacttcaagctcttcaacatccaggtcaaggaggtcacgcagaatgaaggcaccaagaccatcgccaataaccttaccagcacgattcaggtctttacggactcggaataccggctcccgtacgtcctcggctctgcgcaccagggctgcctgcctccgttcccggcggacgtcttcatgattcctcagtacgggtacctgactctgaacaacggcagtcaggccgtgggccgttcctccttctactgcctggagtactttccttctcaaatgctgagaacgggcaacaactttgagttcagctaccagtttgaggacgtgccttttcacagcagctacgcgcacagccaaagcctggaccggctgatgaaccccctcatcgaccagtacctgtactacctgtctcggactcagtccacgggaggtaccgcaggaactcagcagttgctattttctcaggccgggcctaataacatgtcggctcaggccaaaaactggctacccgggccctgctaccggcagcaacgcgtctccacgacactgtcgcaaaataacaacagcaactttgcttggaccggtgccaccaagtatcatctgaatggcagagactctctggtaaatcccggtgtcgctatggcaacgcacaaggacgacgaagagcgattttttccatccagcggagtcttgatgtttgggaaacagggagctggaaaagacaacgtggactatagcagcgttatgctaaccagtgaggaagaaatcaaaaccaccaacccagtggccacagaacagtacggcgtggtggccgataacctgcaacagcaaaacgccgctcctattgtaggggccgtcaacagtcaaggagccttacctggcatggtctggcagaaccgggacgtgtacctgcagggtcctatctgggccaagattcctcacacggacggcaactttcatccttcgccgctgatgggaggctttggactgaaacacccgcctcctcagatcctgattaagaatacacctgttcccgcggatcctccaactaccttcagtcaagccaagccggcgtcgttcatcacgcagtacagcaccggacaggtcagcgtggaaattgaatgggagctgcagaaagagaacagcaagcgctggaacccagagattcagtatacttccaactactacaaatctacaaatgtggactttgctgtcaatactgagggtacttattcagagcctcgccccattggcacccgttacctcacccgtaacctgtaattgcctgttaatcaataaaccggttaattcgtttcagttgaactttggtctctgcgaagggcgaattc

SEQ ID NO: 78 - protein, 731 aa, synthetic construct
  REGION 1..731: note = source = /note="Description of Artificial Sequence: Synthetic polypeptide"
MAADGYLPDWLEDNLSEGIREWWDLKPGAPKPKANQQKQDDGRGLVLPGYKYLGPFNGLDKGEPVNEADAAALEHDKAYDKQLEQGDNPYLKYNHADAEFQERLQEDTSFGGNLGRAVFQAKKRVLEPLGLVEEGAKTAPGKKRPIESPDSSTGIGKKGQQPAKKKLNFGQTGDSESVPDPQPIGEPPAGPSGLGSGTMAAGGGAPMADNNEGADGVGNASGNWHCDSTWLGDRVITTSTRTWALPTYNNHLYKQISSQSGATNDNHFFGYSTPWGYFDFNRFHCHFSSRDWQRLINNNWGFRPKRLNFKLFNIQVKEVTQNEGTKTIANNLTSTIQVFTDSEYRLPYVLGSAHQGCLPPFPADVFMIPQYGYLTLNNGSQAVGRSSFYCLEYFPSQMLRTGNNFEFSYQFEDVPFHSSYAHSQSLDRLMNPLIDQYLYYLSRTQSTGGTAGTQQLLFSQAGPNNMSAQAKNWLPGPCYRQQRVSTTLSQNNNSNFAWTGATKYHLNGRDSLVNPGVAMATHKDDEERFFPSSGVLMFGKQGAGKDNVDYSSVMLTSEEEIKTTNPVATEQYGVVADNLQQQNAAPIVGAVNSQGALPGMVWQNRDVYLQGPIWAKIPHTDGNFHPSPLMGGFGLKHPPPQILIKNTPVPADPPTTFSQAKPASFITQYSTGQVSVEIEWELQKENSKRWNPEIQYTSNYYKSTNVDFAVNTEGTYSEPRPIGTRYLTRNL

SEQ ID NO: 79 - DNA, 3128 bp, synthetic construct
  misc_feature 1..3128: note = source = /note="Description of Artificial Sequence: Synthetic polynucleotide"
  source 1..3128: mol_type = other DNA
gaattcgccctttctacggctgcgtcaactggaccaatgagaactttcccttcaacgattgcgtcgacaagatggtgatctggtgggaggagggcaagatgacggccaaggtcgtggagtccgccaaggccattctcggcggcagcaaggtgcgcgtggaccaaaagtgcaagtcttccgcccagatcgatcccacccccgtgatcgtcacttccaacaccaacatgtgcgccgtgattgacgggaacagcaccaccttcgagcaccagcagccgttacaagaccggatgttcaaatttgaactcacccgccgtctggagcacgactttggcaaggtgacaaagcaggaagtcaaagagttcttccgctgggcgcaggatcacgtgaccgaggtggcgcatgagttctacgtcagaaagggtggagccaacaagagacccgcccccgatgacgcggataaaagcgagcccaagcgggcctgcccctcagtcgcggatccatcgacgtcagacgcggaaggagctccggtggactttgccgacaggtaccaaaacaaatgttctcgtcacgcgggcatgcttcagatgctgtttccctgcaagacatgcgagagaatgaatcagaatttcaacatttgcttcacgcacgggaccagagactgttcagaatgtttccccggcgtgtcagaatctcaaccggtcgtcagaaagaggacgtatcggaaactctgtgccattcatcatctgctagggcgggctcccgagattgcttgctcggcctgcgatctggtcaacgtggacctggatgactgtgtttctgagcaataaatgacttaaaccaggtatggctgccgatggttatcttccagattggctcgaggacaacctctctgagggcattcgcgagtggtgggacttgaaacctggagccccgaaacccaaagccaaccagcaaaagcaggacgacggccggggtctggtgcttcctggctacaagtacctcggacccttcaacggactcgacaagggggagcccgtcaacgcggcggacgcagcggccctcgagcacgacaaggcctacgaccagcagctcaaagcgggtgacaatccgtacctgcggtataaccacgccgacgccgagtttcaggagcgtctgcaagaagatacgtcttttgggggcaacctcgggcgagcagtcttccaggccaagaagcgggttctcgaacctctcggtctggttgaggaaggcgctaagacggctcctggaaagaagagaccggtagagccatcaccccagcgttctccagactcctctacgggcatcggcaagacaggccagcagcccgcgaaaaagagactcaactttgggcagactggcgactcagagtcagtgcccgaccctcaaccaatcggagaaccccccgcaggcccctctggtctgggatctggtacaatggctgcaggcggtggcgctccaatggcagacaataacgaaggcgccgacggagtgggtagttcctcaggaaattggcattgcgattccacatggctgggcgacagagtcatcaccaccagcacccgaacctgggccctccccacctacaacaaccacctctacaagcaaatctccaacgggacatcgggaggaagcaccaacgacaacacctacttcggctacagcaccccctgggggtattttgactttaacagattccactgccacttctcaccacgtgactggcagcgactcatcaacaacaactggggattccggcccaagagactcaacttcaagctcttcaacatccaggtcaaggaggtcacgcagaatgaaggcaccaagaccatcgccaataaccttaccagcacgattcaggtctttacggactcggaataccagctcccgtacgtcctcggctctgcgcaccagggctgcctgcctccgttcccggcggacgtcttcatgattcctcagtacgggtacctgactctgaacaacggcagtcaggccgtgggccgttcctccttctactgcctggagtactttccttctcaaatgctgagaacgggcaacaactttgagttcagctaccagtttgaggacgtgccttttcacagcagctacgcgcacagccaaagcctggaccggctgatgaaccccctcatcgaccagtacctgtactacctgtctcggactcagtccacgggaggtaccgcaggaactcagcagttgctattttctcaggccgggcctaataacatgtcggctcaggccaaaaactggctacccgggccctgctaccggcagcaacgcgtctccacgacactgtcgcaaaataacaacagcaactttgcttggaccggtgccaccaagtatcatctgaatggcagagactctctggtaaatcccggtgtcgctatggcaacgcacaaggacgacgaagagcgattttttccatccagcggagtcttgatgtttgggaaacagggagctggaaaagacaacgtggactatagcagcgttatgctaaccagtgaggaagaaatcaaaaccaccaacccagtggccacagaacagtacggcgtggtggccgataacctgcaacagcaaaacgccgctcctattgtaggggccgtcaacagtcaaggagccttacctggcatggtctggcagaaccgggacgtgtacctgcagggtcctatctgggccaagattcctcacacggacggcaactttcatccttcgccgctgatgggaggctttggactgaaacacccgcctcctcagatcctgattaagaatacacctgttcccgcggatcctccaactaccttcagtcaagccaagctggcgtcgttcatcacgcagtacagcaccggacaggtcagcgtggaaattgaatgggagctgcagaaagagaacagcaagcgctggaacccagagattcagtatacttccaactactacaaatctacaaatgtggactttgctgtcaatactgagggtacttattcagagcctcgccccattggcacccgttacctcacccgtaacctgtaattgcctgttaatcaataaaccggctaattcgtttcagttgaactttggtctctgcgaagggcgaattc

SEQ ID NO: 80 - protein, 738 aa, synthetic construct
  REGION 1..738: note = source = /note="Description of Artificial Sequence: Synthetic polypeptide"
MAADGYLPDWLEDNLSEGIREWWDLKPGAPKPKANQQKQDDGRGLVLPGYKYLGPFNGLDKGEPVNAADAAALEHDKAYDQQLKAGDNPYLRYNHADAEFQERLQEDTSFGGNLGRAVFQAKKRVLEPLGLVEEGAKTAPGKKRPVEPSPQRSPDSSTGIGKTGQQPAKKRLNFGQTGDSESVPDPQPIGEPPAGPSGLGSGTMAAGGGAPMADNNEGADGVGSSSGNWHCDSTWLGDRVITTSTRTWALPTYNNHLYKQISNGTSGGSTNDNTYFGYSTPWGYFDFNRFHCHFSPRDWQRLINNNWGFRPKRLNFKLFNIQVKEVTQNEGTKTIANNLTSTIQVFTDSEYQLPYVLGSAHQGCLPPFPADVFMIPQYGYLTLNNGSQAVGRSSFYCLEYFPSQMLRTGNNFEFSYQFEDVPFHSSYAHSQSLDRLMNPLIDQYLYYLSRTQSTGGTAGTQQLLFSQAGPNNMSAQAKNWLPGPCYRQQRVSTTLSQNNNSNFAWTGATKYHLNGRDSLVNPGVAMATHKDDEERFFPSSGVLMFGKQGAGKDNVDYSSVMLTSEEEIKTTNPVATEQYGVVADNLQQQNAAPIVGAVNSQGALPGMVWQNRDVYLQGPIWAKIPHTDGNFHPSPLMGGFGLKHPPPQILIKNTPVPADPPTTFSQAKLASFITQYSTGQVSVEIEWELQKENSKRWNPEIQYTSNYYKSTNVDFAVNTEGTYSEPRPIGTRYLTRNL

SEQ ID NO: 81 - DNA, 3084 bp, synthetic construct
  misc_feature 1..3084: note = source = /note="Description of Artificial Sequence: Synthetic polynucleotide"
  source 1..3084: mol_type = other DNA
gaattcgccctttctacggctgcatcaactggaccaatgagaactttcccttcaacgattgcgtcgacaagatggtgatctggtgggaggagggcaagatgacggccaaggtcgtggagtccgccaaggccattctcggcggcagcaaggtgcgcgtggaccaaaagtgcaagtcgtccgcccagatcgaccccacccccgtgatcgtcacctccaacaccaacatgtgcgccgtgattgacgggaacagcaccaccttcgagcaccagcagccgttgcaggaccggatgttcaagttcgaactcacccgccgtctggagcacgactttggcaaggtgaccaagcaggaagtcaaagagttcttccgctgggcgcaggatcacgtgaccgaggtggcgcatgagttctacgtcagaaagggcggagccagcaaaagacccgcccccgatgacgcggatataagcgagcccaagcgggcctgcccctcagtcgcggatccatcgacgtcagacgcggaaggagctccggtggactttgccgacaggtaccaaaacaaatgttctcgtcacgcgggcatgcttcagatgctgtttccctgcaaaacgtgcgagaaaatgaatcagaatttcaacatttgcttcacgcacggggtcagagactgctcagaatgtttccccggtgcatcagaatctcaaccggtcgtcagaaaaaaaacgtatcagaaactgtgtgccattcatcatctgctggggcgggcacccgagattgcttgctcggcctgcgatctggtcaacgtggacctggacgactgtgtttctgagcaataaatgacttaaaccaggtatggctgccgatggttatcttccagattggcttgaggacaacctctctgagggcattcgcgagtggtgggacctgaaacctggagccccgaaacccaaagccaaccagcaaaagcaggacgacggccggggtctggtgcttcctggctacaagtacctcggacccttcaacggactcgacaagggggagcccgtcaacgcggcggacgcagcggccctcgagcacgacaaggcctacgaccagcagctcaaagcgggtgacaatccgtacctgcggtataaccacgccgacgccgagtttcaggagcgtctgcaagaagatacgtcttttgggggcaacctcgggcgagcagtcttccaggccaagaagcgggttctcgaacctctcggtctggttgaggaaggcgctaagacggctcctggaaagaagagaccggtagagccatcacctcagcgttcccccgactcctccacgggcatcggcaagaaaggccaccagcccgcgagaaagagactgaactttgggcagactggcgactcggagtcagtccccgaccctcaaccaatcggagaaccaccagcaggcccctctggtctgggatctggtacaatggctgcaggcggtggcgctccaatggcagacaataacgaaggcgccgacggagtgggtagttcctcaggaaattggcattgcgattccacatggctgggcgacagagtcatcaccaccagcacccgaacctgggccctgcccacctacaacaaccatctctacaagcaaatctccaacgggacatcgggaggaagcactaacgacaacacctactttggctacagcaccccctgggggtattttgacttcaacagattccactgccacttctcaccacgtgactggcagcgactcatcaacaataactggggattccggcccaagagactcaacttcaagctcttcaacatccaggtcaaggaggtcacgcagaatgaaggcaccaagaccatcgccaataaccttaccagcacgattcaggtgtttacggactcggaataccagctcccgtacgtccccggctctgcgcaccagggctgcctccctccgttcccggcggacgtcttcatgattcctcagtacgggtatctgaccctaaacaatggcagtcaggctgtgggccgttcctccttctactgcctggaatacttcccttctcaaatgctgaggacgggcaacaactttgaattcagctacaccttcgaggacgtgcctttccacagcagctacgcgcacagccagagcctggaccggctgatgaaccctctcatcgaccagtacctgtattacttatccagaactcagtccacaggaggaactcaaggtactcagcaattgttattttctcaagccgggcccgcaaacatgtcggctcaggccaagaactggctacctggaccgtgttaccgtcagcaacgagtttccacgacactgtcgcaaaacaacaacagcaattttgcttggaccggtgccaccaagtatcacctgaatggcagagactccctggttaatcccggcgttgccatggctacccacaaggacgacgaggagcgcttcttcccgtcaagcggagttctaatgtttggcaagcagggggctggaaaagacaatgtggactacagcagcgtgatgctcaccagcgaagaagaaattaaaactactaacccagtggctacagagcagtatggtgtggtggcagacaacctgcagcagaccaacggagctcccattgtgggaactgtcaacagccagggggccttacctggtatggtctggcaaaaccgggacgtgtacctgcagggccccatctgggccaaaattcctcacacggacggcaactttcatccttcgccgctgatgggaggctttggactgaaacacccgcctcctcagatcctggtgaaaaacactcctgttcctgcggatcctccgaccaccttcagccaggccaagctggcttcttttatcacgcagtacagcaccggacaggtcagcgtggaaatcgaatgggagctgcagaaagaaaacagcaagcgctggaacccagagattcagtatacttccaactactacaaatctacaaatgtggactttgctgtcaatactgagggtacttattcagagcctcgccccattggcactcgttatctcacccgtaatctgtaattgcttgttaatcaataaaccggt

SEQ ID NO: 82 - protein, 738 aa, synthetic construct
  REGION 1..738: note = source = /note="Description of Artificial Sequence: Synthetic polypeptide"
MAADGYLPDWLEDNLSEGIREWWDLKPGAPKPKANQQKQDDGRGLVLPGYKYLGPFNGLDKGEPVNAADAAALEHDKAYDQQLKAGDNPYLRYNHADAEFQERLQEDTSFGGNLGRAVFQAKKRVLEPLGLVEEGAKTAPGKKRPVEPSPQRSPDSSTGIGKKGHQPARKRLNFGQTGDSESVPDPQPIGEPPAGPSGLGSGTMAAGGGAPMADNNEGADGVGSSSGNWHCDSTWLGDRVITTSTRTWALPTYNNHLYKQISNGTSGGSTNDNTYFGYSTPWGYFDFNRFHCHFSPRDWQRLINNNWGFRPKRLNFKLFNIQVKEVTQNEGTKTIANNLTSTIQVFTDSEYQLPYVPGSAHQGCLPPFPADVFMIPQYGYLTLNNGSQAVGRSSFYCLEYFPSQMLRTGNNFEFSYTFEDVPFHSSYAHSQSLDRLMNPLIDQYLYYLSRTQSTGGTQGTQQLLFSQAGPANMSAQAKNWLPGPCYRQQRVSTTLSQNNNSNFAWTGATKYHLNGRDSLVNPGVAMATHKDDEERFFPSSGVLMFGKQGAGKDNVDYSSVMLTSEEEIKTTNPVATEQYGVVADNLQQTNGAPIVGTVNSQGALPGMVWQNRDVYLQGPIWAKIPHTDGNFHPSPLMGGFGLKHPPPQILVKNTPVPADPPTTFSQAKLASFITQYSTGQVSVEIEWELQKENSKRWNPEIQYTSNYYKSTNVDFAVNTEGTYSEPRPIGTRYLTRNL

SEQ ID NO: 83 - DNA, 3123 bp, synthetic construct
  misc_feature 1..3123: note = source = /note="Description of Artificial Sequence: Synthetic polynucleotide"
  source 1..3123: mol_type = other DNA
gaattcgcccttggctgcgtcaactggaccaatgagaactttcccttcaacgattgcgtcgacaagatggtgatctggtgggaggagggcaagatgacggccaaggtcgtggagtccgccaaggccattctcggcggcagcaaggtgcgcgtggaccaaaagtgcaagtcgtccgcccagatcgaccccacccccgtgatcgtcacctccaacaccaacatgtgcgccgtgattgacgggaacagcaccaccttcgagcaccagcagccgttgcaggaccggatgttcaagttcgaactcacccgccgtctggagcacgactttggcaaggtgaccaagcaggaagtcaaagagttcttccgctgggcgcaggatcacgtgaccgaggtggcgcatgagttctacgtcagaaagggcggagccagcaaaagacccgcccccgatgacgcggatataagcgagcccaagcgggcctgcccctcagtcgcggatccatcgacgtcagacgcggaaggagctccggtggactttgccgacaggtaccaaaacaaatgttctcgtcacgcgggcatgctccagatgctgtttccctgcaaaacgtgcgagagaatgaatcagaatttcaacatttgcttcacgcacggggtcagagactgctcagaatgtttccccggtgcatcagaatctcaaccggtcgtcagaaaaaaaacgtatcagaaactgtgtgccattcatcatctgctggggcgggcacccgagattgcttgctcggcctgcgatctggtcaacgtggacctggacgactgtgtttctgagcaataaatgacttaaaccaggtatggctgccgatggttatcttccagattggcttgaggacaacctctctgagggcattcgcgagtggtgggacctgaaacctggagccccgaaacccaaagccaaccagcaaaagcaggacgacggccggggtctggtgcttcctggctacaagtacctcggacccttcaacggactcgacaagggggagcccgtcaacgcggcggacgcagcggccctcgagcacgacaaggcctacgaccagcagctcaaagcgggtgacaatccgtacctgcggtataaccacgccgacgccgagtttcaggagcgtctgcaagaagatacgtcttttgggggcaacctcgggcgagcagtcttccaggccaagaagcgggttctcgaacctctcggtctggttgaggaaggcgctaagacggctcctggaaagaagagaccggtagagccatcacctcagcgttcccccgactcctccacgggcatcggcaagaaaggccaccagcccgcgagaaagagactgaactttgggcagactggcgactcggagtcagtccccgaccctcaaccaatcggagaaccaccagcaggcccctctggtctgggatctggtacaatggctgcaggcggtggcgctccaatggcagacaataacgaaggcgccgacggagtgggtagttcctcaggaaattggcattgcgattccacatggctgggcgacagagtcatcaccaccagcacccgaacctgggccctgcccacctacaacaaccatctctacaagcaaatctccaacgggacatcgggaggaagcactaacgacaacacctactttggctacagcaccccctgggggtattttgacttcaacagattccactgccacttctcaccacgtgactggcagcgactcatcaacaataactggggattccggcccaagagactcaacttcaagctcttcaacatccaggtcaaggaggtcacgcagaatgaaggcaccaagaccatcgccaataaccttaccagcacgattcaggtgtttacggactcggaataccagctcccgtacgtcctcggctctgcgcaccagggctgcctccctccgttcccggcggacgtcttcatgattcctcagtacgggtatctgaccctaaacaatggcagtcaggctgtgggccgttcctccttctactgcctggaatacttcccttctcaaatgctgaggacgggcaacaactttgaattcagctacaccttcgaggacgtgcctttccacagcagctacgcgcacagccagagcctggaccggctgatgaaccctctcatcgaccagtacctgtattacttatccagaactcagtccacaggaggaactcaaggtactcagcaattgttattttctcaagccgggcccgcaaacatgtcggctcaggccaagaactggctacctggaccgtgttaccgtcagcaacgagtttccacgacactgtcgcaaaacaacaacagcaattttgcttggaccggtgccaccaagtatcacctgaatggcagagactccctggttaatcccggcgttgccatggctacccacaaggacgacgaggagcgcttcttcccgtcaagcggagttctaatgtttggcaagcagggggctggaaaagacaatgtggactacagcagcgtgatgctcaccagcgaagaagaaattaaaactactaacccagtggctacagagcagtatggtgtggtggcagacaacctgcagcagaccaacggagctcccattgtgggaactgtcaacagccagggggccttacctggtatggtctggcaaaaccgggacgtgtacctgcagggccccatctgggccaaaattcctcacacggacggcaactttcatccttcgccgctgatgggaggctttggactgaaacacccgcctcctcagatcctggtgaaaaacactcctgttcctgcggatcctccgaccaccttcagccaggccaagctggcttcttttatcacgcagtacagcaccggacaggtcagcgtggaaatcgaatgggagctgcagaaagaaaacagcaagcgctggaacccagagattcagtatacttccaactactacaaatctacaaatgtggactttgctgtcaatactgagggtacttattcagagcctcgccccattggcactcgttatctcacccgtaatctgtaattgcttgttaatcaataaaccggttaattcgtttcagttgaactttggtctctgcgaagggcgaattc

SEQ ID NO: 84 - protein, 738 aa, synthetic construct
  REGION 1..738: note = source = /note="Description of Artificial Sequence: Synthetic polypeptide"
MAADGYLPDWLEDNLSEGIREWWDLKPGAPKPKANQQKQDDGRGLVLPGYKYLGPFNGLDKGEPVNAADAAALEHDKAYDQQLKAGDNPYLRYNHADAEFQERLQEDTSFGGNLGRAVFQAKKRVLEPLGLVEEGAKTAPGKKRPVEPSPQRSPDSSTGIGKKGHQPARKRLNFGQTGDSESVPDPQPIGEPPAGPSGLGSGTMAAGGGAPMADNNEGADGVGSSSGNWHCDSTWLGDRVITTSTRTWALPTYNNHLYKQISNGTSGGSTNDNTYFGYSTPWGYFDFNRFHCHFSPRDWQRLINNNWGFRPKRLNFKLFNIQVKEVTQNEGTKTIANNLTSTIQVFTDSEYQLPYVLGSAHQGCLPPFPADVFMIPQYGYLTLNNGSQAVGRSSFYCLEYFPSQMLRTGNNFEFSYTFEDVPFHSSYAHSQSLDRLMNPLIDQYLYYLSRTQSTGGTQGTQQLLFSQAGPANMSAQAKNWLPGPCYRQQRVSTTLSQNNNSNFAWTGATKYHLNGRDSLVNPGVAMATHKDDEERFFPSSGVLMFGKQGAGKDNVDYSSVMLTSEEEIKTTNPVATEQYGVVADNLQQTNGAPIVGTVNSQGALPGMVWQNRDVYLQGPIWAKIPHTDGNFHPSPLMGGFGLKHPPPQILVKNTPVPADPPTTFSQAKLASFITQYSTGQVSVEIEWELQKENSKRWNPEIQYTSNYYKSTNVDFAVNTEGTYSEPRPIGTRYLTRNL

SEQ ID NO: 85 - DNA, 3122 bp, synthetic construct
  misc_feature 1..3122: note = source = /note="Description of Artificial Sequence: Synthetic polynucleotide"
  source 1..3122: mol_type = other DNA
gaattcgccctttctacggctgcgtcaactggaccaatgagaactttcccttcaacgattgcgtcgacaagatggtgatctggtgggaggagggcaagatgacggccaaggtcgtggagtccgccaaggccattctcggcggcagcaaggtgcgtgtggaccaaaagtgcaagtcttccgcccagatcgatcccacccccgtgatcgtcacctccaacaccaacatgtgcgccgtgattgacgggaacagcgccaccttcgagcaccagcagccgttgcaggaccggatgttcaaatttgaactcacccgccgtctggagcatgactttggcaaggtgacgaagcaggaagtcaaagagttcttccgctgggcgcaggatcacgtgaccgaggtggcgcatgagttccacgtcagaaagggtggagccaacaagagacccgcccccgatgacgcggatataagcgagcccaagcgggcctgcccctcagtcgcggatccatcgacgtcagacgcggaaggagctccggtggactttgccgacaggtaccaaaacaaatgttctcgtcacgcgggcatgcttcagatgctgtttccctgcaagacatgcgagagaatgaatcagaatttcaacatttgcttcacgcacgggaccagagactgttcagaatgtttccccggcgtgtcagaatctcaaccggtcgtcagaaagaggacgtatcggaaactctgtgcgattcatcatctgctggggcgggctcccgagattgcttgctcggcctgcgatctggtcaacgtggacctggatgactgtgtttctgagcaataaatgacttaaaccaggtatggctgccgatggttatcttccagattggctcgaggacaacctctctgagggcattcgcgagtggtgggacttgaaacctggagccccgaaacccaaagccaaccagcaaaagcaggacgacggccggggtctggtgcttcctggctacaagtacctcggacccttcaacggactcgacaagggggagcccgtcaacgcggcggacgcagcggccctcgagcacgacaaagcctacgaccagcagctcaaagcgggtgacaatccgtacctgcggtataatcacgccgacgccgagtttcaggagcgtctgcaagaagatacgtcttttgggggcaacctcgggcgagcagtcttccaggccaagaagcgggttctcgaacctctcggtctggttgaggaaggcgctaagacggctcctggaaagaagagactggtagagcagtcgccacaagagccagactcctcctcgggcatcggcaagacaggccagcagcccgctaaaaagagactcaattttggtcagactggcgactcagagtcagtccccgacccacaacctctcggagaacctccagcagccccctcaggtctgggacctaatacaatggcttcaggcggtggcgctccaatggcagacaataacgaaggcgccgacggagtgggtaattcctcgggaaattggcattgcgattccacatggctgggggacagagtcatcaccaccagcacccgaacctgggccctgcccacctacaacaaccacctctacaagcaaatctccaacggcacctcgggaggaagcaccaacgacaacacctattttggctacagcaccccctgggggtattttgacttcaacagattccactgtcacttttcaccacgtgactggcaacgactcatcaacaacaattggggattccggcccaaaagactcaacttcaagctgttcaacatccaggtcaaggaagtcacgacgaacgaaggcaccaagaccatcgccaataatctcaccagcaccgtgcaggtctttacggactcggagtaccagttaccgtacgtgctaggatccgctcaccagggatgtctgcctccgttcccggcggacgtcttcacggttcctcagtacggctatttaactttaaacaatggaagccaagccctgggacgttcctccttctactgtctggagtatttcccatcgcagatgctgagaaccggcaacaactttcagttcagctacaccttcgaggacgtgcctttccacagcagctacgcgcacagccagagcctggacaggctgatgaatcccctcatcgaccagtacctgtactacctggtcagaacgcaaacgactggaactggagggacgcagactctggcattcagccaagcgggtcctagctcaatggccaaccaggctagaaattgggtgcccggaccttgctaccggcagcagcgcgtctccacgacaaccaaccagaacaacaacagcaactttgcctggacgggagctgccaagtttaagctgaacggccgagactctctaatgaatccgggcgtggcaatggcttcccacaaggatgacgacgaccgcttcttcccttcgagcggggtcctgatttttggcaagcaaggagccgggaacgatggagtggattacagccaagtgctgattacagatgaggaagaaatcaaggctaccaaccccgtggccacagaagaatatggagcagtggccatcaacaaccaggccgccaatacgcaggcgcagaccggactcgtgcacaaccagggggtgattcccggcatggtgtggcagaatagagacgtgtacctgcagggtcccatctgggccaaaattcctcacacggacggcaactttcacccgtctcccctgatgggcggctttggactgaagcacccgcctcctcaaattctcatcaagaacacaccggttccagcggacccgccgcttaccttcaaccaggccaagctgaactctttcatcacgcagtacagcaccggacaggtcagcgtggaaatcgagtgggagctgcagaaagaaaacagcaaacgctggaatccagagattcaatacacttccaactactacaaatctacaaatgtggactttgctgtcaacacggaaggagtttatagcgagcctcgccccattggcacccgttacctcacccgcaacctgtaattacatgttaatcaataaaccggttaattcgtttcagttgaactttggtctctgcgaagggcgaattc

SEQ ID NO: 86 - protein, 736 aa, synthetic construct
  REGION 1..736: note = source = /note="Description of Artificial Sequence: Synthetic polypeptide"
MAADGYLPDWLEDNLSEGIREWWDLKPGAPKPKANQQKQDDGRGLVLPGYKYLGPFNGLDKGEPVNAADAAALEHDKAYDQQLKAGDNPYLRYNHADAEFQERLQEDTSFGGNLGRAVFQAKKRVLEPLGLVEEGAKTAPGKKRLVEQSPQEPDSSSGIGKTGQQPAKKRLNFGQTGDSESVPDPQPLGEPPAAPSGLGPNTMASGGGAPMADNNEGADGVGNSSGNWHCDSTWLGDRVITTSTRTWALPTYNNHLYKQISNGTSGGSTNDNTYFGYSTPWGYFDFNRFHCHFSPRDWQRLINNNWGFRPKRLNFKLFNIQVKEVTTNEGTKTIANNLTSTVQVFTDSEYQLPYVLGSAHQGCLPPFPADVFTVPQYGYLTLNNGSQALGRSSFYCLEYFPSQMLRTGNNFQFSYTFEDVPFHSSYAHSQSLDRLMNPLIDQYLYYLVRTQTTGTGGTQTLAFSQAGPSSMANQARNWVPGPCYRQQRVSTTTNQNNNSNFAWTGAAKFKLNGRDSLMNPGVAMASHKDDDDRFFPSSGVLIFGKQGAGNDGVDYSQVLITDEEEIKATNPVATEEYGAVAINNQAANTQAQTGLVHNQGVIPGMVWQNRDVYLQGPIWAKIPHTDGNFHPSPLMGGFGLKHPPPQILIKNTPVPADPPLTFNQAKLNSFITQYSTGQVSVEIEWELQKENSKRWNPEIQYTSNYYKSTNVDFAVNTEGVYSEPRPIGTRYLTRNL

SEQ ID NO: 87 - DNA, 3117 bp, synthetic construct
  misc_feature 1..3117: note = source = /note="Description of Artificial Sequence: Synthetic polynucleotide"
  source 1..3117: mol_type = other DNA
gaattcgcccttggctgcgtcaactggaccaatgagaactttcccttcaacgattgcgtcgacaagatggtgatctggtgggaggagggcaagatgacggccaaggtcgtggagtccgccaaggccattctcggcggcagcaaggtgcgtgtggaccaaaagtgcaagtcttccgcccagatcgatcccacccccgtgatcgtcacctccaacaccaacatgtgcgccgtgattgacgggaacagcaccaccttcgagcaccagcagccgttgcaggaccggatgttcaaatttgaactcacccgccgtctggagcatgactttggcaaggtgacgaagcaggaagtcaaagagttcttccgctgggcgcaggatcacgtgaccgaggtggcgcatgagttccacgtcagaaagggtggagccaacaagagacccgcccccgatgacgcggatataagcgagcccaagcgggcctgcccctcagtcgcggatccatcgacgtcagacgcggaaggagctccggtggactttgccgacaggtaccaaaacaaatgttctcgtcacgcgggcatgcttcagatgctgtttccctgcaagacatgcgagagaatgaatcagaatttcaacatttgcttcacgcacgggaccagagactgttcagaatgtttccccggcgtgtcagaatctcaaccggtcgtcagaaagaggacgtatcggaaactctgtgcgattcatcatctgctggggcgggctcccgagattgcttgctcggcctgcgatctggtcaacgtggacctggatgactgtgtttctgagcaataaatgacttaaaccaggtatggctgccgatggttatcttccagattggctcgaggacaacctctctgagggcattcgcgagtggtgggacttgaaacctggagccccgaaacccaaagccaaccagcaaaagcaggacgacggccggggtctggtgcttcctggctacaagtacctcggacccttcaacggactcgacaagggggagcccgtcaacgcggcggacgcagcggccctcgagcacgacaaagcctacgaccagcagctcaaagcgggtgacaatccgtacctgcggtataatcacgccgacgccgagtttcaggagcgtctgcaagaagatacgtcttttgggggcaacctcgggcgagcagtcttccaggccaagaagcgggttctcgaacctctcggtctggttgaggaaggcgctaagacggctcctggaaagaagagaccggtagagcagtcgccacaagagccagactcctcctcgggcatcggcaagacaggccagcagcccgctaaaaagagactcaattttggtcagactggcgactcagagtcagtccccgacccacaacctctcggagaacctccagcagccccctcaggtctgggacctaatacaatggcttcaggcggtggcgctccaatggcagacaataacgaaggcgccgacggagtgggtaattcctcgggaaattggcattgcgattccacatggctgggggacagagtcatcaccaccagcacccgaacctgggccctgcccacctacaacaaccacctctacaagcaaatctccaacggcacctcgggaggaagcaccaacgacaacacctattttggctacagcaccccctgggggtattttgacttcaacagattccactgtcacttttcaccacgtgactggcaacgactcatcaacaacaattggggattccggcccaaaagactcaacttcaagctgttcaacatccaggtcaaggaagtcacgacgaacgaaggcaccaagaccatcgccaataatctcaccagcaccgtgcgggtctttacggactcggagtaccagttaccgtacgtgctaggatccgctcaccagggatgtctgcctccgttcccggcggacgtcttcatggttcctcagtacggctatttaactttaaacaatggaagccaagccctgggacgttcctccttctactgtctggagtatttcccatcgcagatgctgagaaccggcaacaactttcagttcagctacaccttcgaggacgtgcctttccacagcagctacgcgcacagccagagcctggacaggctgatgaatcccctcatcgaccagtacctgtactacctggtcagaacgcaaacgactggaactggagggacgcagactctggcattcagccaagcgggtcctagctcaatggccaaccaggctagaaattgggtgcccggaccttgctaccggcagcagcgcgtctccacgacaaccaaccagagcaacaacagcaactttgcctggacgggagctgccaagtttaagctgaacggccgagactctctaatgaatccgggcgtggcaatggcttcccacaaggatgacgacgaccgcttcttcccttcgagcggggtcctgatttttggcaagcaaggagccgggaacgatggagtggattacagccaagtgctgattacagatgaggaagaaatcaaggctaccaaccccgtggccacagaagaatatggagcagtggccatcaacaaccaggccgccaatacgcaggcgcagaccggactcgtgcacaaccagggggtgattcccggcatggtgtggcagaatagagacgtgtacctgcagggtcccatctgggccaaaattcctcacacggacggcaactttcacccgtctcccctgatgggcggctttggactgaagcacccgcctcctcaaattctcatcaagaacacaccggttccagcggacccgccgcttaccttcaaccaggccaagctgaactctttcatcacgcagtacagcaccggacaggtcagcgtggaaatcgagtgggagctgcagaaagaaaacagcaaacgctggaatccagagattcaatacacttccaactactacaaatctacaaatgtggactttgctgtcaacacggaaggagtttatagcgagcctcgccccattggcacccgttacctcacccgcaacctgtaattacatgttaatcaataaaccggttaattcgtttcagttgaactttggtctctgcgaagggcgaattc

SEQ ID NO: 88 - protein, 736 aa, synthetic construct
  REGION 1..736: note = source = /note="Description of Artificial Sequence: Synthetic polypeptide"
MAADGYLPDWLEDNLSEGIREWWDLKPGAPKPKANQQKQDDGRGLVLPGYKYLGPFNGLDKGEPVNAADAAALEHDKAYDQQLKAGDNPYLRYNHADAEFQERLQEDTSFGGNLGRAVFQAKKRVLEPLGLVEEGAKTAPGKKRPVEQSPQEPDSSSGIGKTGQQPAKKRLNFGQTGDSESVPDPQPLGEPPAAPSGLGPNTMASGGGAPMADNNEGADGVGNSSGNWHCDSTWLGDRVITTSTRTWALPTYNNHLYKQISNGTSGGSTNDNTYFGYSTPWGYFDFNRFHCHFSPRDWQRLINNNWGFRPKRLNFKLFNIQVKEVTTNEGTKTIANNLTSTVRVFTDSEYQLPYVLGSAHQGCLPPFPADVFMVPQYGYLTLNNGSQALGRSSFYCLEYFPSQMLRTGNNFQFSYTFEDVPFHSSYAHSQSLDRLMNPLIDQYLYYLVRTQTTGTGGTQTLAFSQAGPSSMANQARNWVPGPCYRQQRVSTTTNQSNNSNFAWTGAAKFKLNGRDSLMNPGVAMASHKDDDDRFFPSSGVLIFGKQGAGNDGVDYSQVLITDEEEIKATNPVATEEYGAVAINNQAANTQAQTGLVHNQGVIPGMVWQNRDVYLQGPIWAKIPHTDGNFHPSPLMGGFGLKHPPPQILIKNTPVPADPPLTFNQAKLNSFITQYSTGQVSVEIEWELQKENSKRWNPEIQYTSNYYKSTNVDFAVNTEGVYSEPRPIGTRYLTRNL

SEQ ID NO: 89 - DNA, 3121 bp, synthetic construct
  misc_feature 1..3121: note = source = /note="Description of Artificial Sequence: Synthetic polynucleotide"
  source 1..3121: mol_type = other DNA
gaattcgcccttctacggctgcgtcaactggaccaatgagaactttcccttcaacgattgcgtcgacaagatggtgatctggtgggaggagggcaagatgacggccaaggtcgtggagtccgccaaggccattctcggcggcagcaaggtgcgtgtggaccaaaagtgcaagtcttccgcccagatcgatcccacccccgtgatcgtcacctccaacaccaacatgtgcgccgtgattgacgggaacagcaccaccttcgagcaccagcagccgttgcaggaccggatgttcaaatttgaactcacccgccgtctggagcatgactttggcaaggtgacgaagcaggaagtcaaagagttcttccgctgggcgcaggatcacgtgaccgaggtggcgcatgagttccacgtcagaaagggtggcgccaacaagagacccgcccccgatgacgcggatataagcgagcccaagcgggcctgcccctcagtcgcggatccatcgacgtcagacgcggaaggagctccggtggactttgccgacaggtaccaaaacaaatgttctcgtcacgcgggcatgcttcagatgctgtttccctgcaagacatgcgagagaatgaatcagaatttcaacatttgcttcacgcacgggaccagagactgttcagaatgtttccccggcgtgtcagaatctcaaccggtcgtcagaaagaggacgtatcggaaactctgtgcgattcatcatctgctggggcgggctcccgagattgcttgctcggcctgcgatctggtcaacgtggacctggatgactgtgtttctgagcaataaatgacttaaaccaggtatggctgccgatggttatcttccagattggctcgaggacaacctctctgagggcattcgcgagtggtgggacttgaaacctggagccccgaaacccaaagccaaccagcaaaagcaggacgacggccggggtctggtgcttcctggctacaagtacctcggacccttcaacggactcgacaagggggagcccgtcaacgcggcggacgcagcggccctcgagcacgacaaagcctacgaccagcagctcaaagcgggtgacaatccgtacctgcggtataatcacgccgacgccgagtttcaggagcgtctgcaagaagatacgtcctttgggggcaacctcgggcgagcagtcttccaggccaagaagcgggttctcgaacctctcggtctggttgaggaaggcgctaagacggctcctggaaagaagagaccggtagagcagtcgccacaagagccagactcctcctcgggcatcggcaagacaggccagcagcccgctaaaaagagactcaattttggtcagactggcgactcagagtcagtccccgacccacaacctctcggagaacctccagcagccccctcaggtctgggacctaatacaatggcttcaggcggtggcgctccaatggcagacaataacgaaggcgccgacggagtgggtaattcctcgggaaattggcattgcgattccacatggctgggggacagagtcatcaccaccagcacccgaacctgggccctgcccacctacaacaaccacctctacaagcaaatctccaacggcacctcgggaggaagcaccaacgacaacacctattttggctacagcaccccctgggggtattttgacttcaacagattccactgtcacttttcaccacgtgactggcaacgactcatcaacaacaattggggattccggcccaaaagactcaacttcaagctgttcaacatccaggtcaaggaagtcacgacgaacgaaggcaccaagaccatcgccaataatctcaccagcaccgtgcaggtctttacggacttggagtaccagttaccgtacgtgctaggatccgctcaccagggatgtctgcctccgttcccggcggacgtcttcatggttcctcagtacggctatttaactttaaacaatggaagccaagccctgggacgttcctccttctactgtctggagtatttcccatcgcagatgccgagaaccggcaacaactttcagttcagctacaccttcgaggacgtgcctttccacagcagctacgcgcacagccagagcctggacaggctgatgaatcccctcatcgaccagtacctgtactacctggtcagaacgcaaacgactggaactggagggacgcagactctggcattcagccaagcgggtcctagctcaatggccaaccaggctagaaattgggtgcccggaccttgctaccggcagcagcgcgtctccacgacaaccaaccagaacaacaacagcaactttgcctggacgggagctgccaagtttaagctgaacggccgagactctctaatgaatccgggcgtggcaatggcttcccacaaggatgacgacgaccgcttcttcccttcgagcggggtcctgatttttggcaagcaaggagccgggaacgatggagtggattacagccaagtgctgattacagatgaggaagaaatcaaggctaccaaccccgtggccacagaagaatatggagcagtggccatcaacaaccaggccgccaatacgcaggcgcagaccggactcgtgcacaaccagggggtgattcccggcatggtgtggcagaatagagacgtgtacctgcagggtcccatctgggccaaaattcctcacacggacggcaactttcacccgtctcccctgatgggcggctttggactgaagcacccgcctcctcaaattctcatcaagaacacaccggttccagcggacccgccgcttaccttcaaccaggccaagctgaactctttcatcacgcagtacagcaccggacaggtcagcgtggaaatcgagtgggagctgcagaaagaaaacagcaaacgctggaatccagagattcaatacacttccaactactacaaatctacaaatgtggactttgctgtcaacacggaaggagtttatagcgagcctcgccccattggcacccgttacctcacccgcaacctgtaattacatgttaatcaataaaccggttaattcgtttcagttgaactttggtctctgcgaagggcgaattc

SEQ ID NO: 90 - protein, 736 aa, synthetic construct
  REGION 1..736: note = source = /note="Description of Artificial Sequence: Synthetic polypeptide"
MAADGYLPDWLEDNLSEGIREWWDLKPGAPKPKANQQKQDDGRGLVLPGYKYLGPFNGLDKGEPVNAADAAALEHDKAYDQQLKAGDNPYLRYNHADAEFQERLQEDTSFGGNLGRAVFQAKKRVLEPLGLVEEGAKTAPGKKRPVEQSPQEPDSSSGIGKTGQQPAKKRLNFGQTGDSESVPDPQPLGEPPAAPSGLGPNTMASGGGAPMADNNEGADGVGNSSGNWHCDSTWLGDRVITTSTRTWALPTYNNHLYKQISNGTSGGSTNDNTYFGYSTPWGYFDFNRFHCHFSPRDWQRLINNNWGFRPKRLNFKLFNIQVKEVTTNEGTKTIANNLTSTVQVFTDLEYQLPYVLGSAHQGCLPPFPADVFMVPQYGYLTLNNGSQALGRSSFYCLEYFPSQMPRTGNNFQFSYTFEDVPFHSSYAHSQSLDRLMNPLIDQYLYYLVRTQTTGTGGTQTLAFSQAGPSSMANQARNWVPGPCYRQQRVSTTTNQNNNSNFAWTGAAKFKLNGRDSLMNPGVAMASHKDDDDRFFPSSGVLIFGKQGAGNDGVDYSQVLITDEEEIKATNPVATEEYGAVAINNQAANTQAQTGLVHNQGVIPGMVWQNRDVYLQGPIWAKIPHTDGNFHPSPLMGGFGLKHPPPQILIKNTPVPADPPLTFNQAKLNSFITQYSTGQVSVEIEWELQKENSKRWNPEIQYTSNYYKSTNVDFAVNTEGVYSEPRPIGTRYLTRNL

SEQ ID NO: 91 - DNA, 3122 bp, synthetic construct
  misc_feature 1..3122: note = source = /note="Description of Artificial Sequence: Synthetic polynucleotide"
  source 1..3122: mol_type = other DNA
gaattcgccctttctacggctgcgtcaactggaccaatgagaactttcccttcaacgattgcgtcgacaagatggtgatctggtgggaggagggcaagatgacggccaaggtcgtggagtccgccaaggccattctcggcggcagcaaggtgcgtgtggaccaaaagtgcaagtcttccgcccagatcgatcccacccccgtgatcgtcacctccaacaccaacatgtgcgccgtgattgacgggaacagcaccaccttcgagcaccagcagccgttgcaggaccggatgttcaaatttgaactcacccgccgtctggagcatgactttggcaaggtgacgaagcaggaagtcaaagggttcttccgctgggcgcaggatcacgtgaccgaggtggcgcatgagttccacgtgcgagcccaagcgggcctgcccctcagtcgcggatccatcgacgtcagaccagaaagggtggagccaacaagagacccgcccccgatgacgcggatataagcggaaggagctccggtggactttgccgacaggtaccaaaacaaatgttctcgtcacgcgggcatgcttcagatgctgtttccctgcaagacatgcgagagaatgaatcagaatttcaacatttgcttcacgcacgggaccagagactgttcagaatgtttccccggcgtgtcagaatctcaaccggtcgtcagaaagaggacgtatcggaaactctgtgcgattcatcatctgctggggcgggctcccgagattgcttgctcggcctgcgatctggtcaacgtggacctggatgactgtgtttctgagcaataaatgacttaaaccaggtatggctgccgatggttatcttccagattggctcgaggacaacctctctgagggcattcgcgagtggtgggacttgaaacctggagccccgaaacccaaagccaaccagcaaaagcaggacgacggccggggtctggtgcttcctggctacaagtacctcggacccttcaacggactcgacaagggggagcccgtcaacgcggcggacgcagcggccctcgagcacgacaaagcctacgaccagcagctcaaagcgggtgacaatccgtacctgcggtataatcacgccgacgccgagtttcaggagcgtctgcaagaagatacgtcttttgggggcaacctcgggcgagcagtcttccaggccaagaagcgggttctcgaacctctcggtctggttgaggaaggcgctaagacggctcctggaaagaagagaccggtagagcagtcgccacaagagccagactcctcctcgggcatcggcaagacaggccagcagcccgctaaaaagagactcaattttggtcagactggcgactcagagtcagtccccgacccacaacctctcggagaacctccagcagccccctcaggtctgggacctaatacaatggcttcaggcggtggcgctccaatggcagacaataacgaaggcgccgacggagtgggtaattcctcgggaaattggcattgcgattccacatggctgggggacagagtcatcaccaccagcacccgaacctgggccctgcccacctacaacaaccacctctacaagcaaatctccaacggcacctcgggaggaagcaccaacgacaacacctattttggctacagcaccccctgggggtattttgacttcaacagattccactgtcacttttcaccacgtgactggcaacgactcatcaacaacaattggggattccggcccaaaagactcaacttcaagctgttcaacatccaggtcaaggaagtcacgacgaacgaaggcaccaagaccatcgccaataatctcaccagcaccgtgcaggtctttacggactcggagtaccagttaccgtacgtgctaggatccgctcaccagggatgtctgcctccgttcccggcggacgtcttcatggttcctcagtacggctatttaactttaaacaatggaagccaagccctgggacgttcctccttctactgtctggagtatttcccatcgcagatgctgagaaccggcaacaactttcagttcagctacaccttcgaggacgtgcctttccacagcagctacgcgcacagccagagcctggacaggctgatgaatcccctcatcgaccagtacctgtactacctggtcagaacgcaaacgactggaactggagggacgcagactctggcattcagccaagcgggtcctagctcaatggccaaccaggctagaaattgggtgcccggaccttgctaccggcagcagcgcgtctccacgacaaccaaccagaacaacaacagcaactttgcctggacgggagctgccaagtttaagctgaacggccgagactctctaatgaatccgggcgtggcaatggcttcccacaaggatgacgacgaccgcttcttcccttcgagcggggtcctgatttttggcaagcaaggagccgggaacgatggagtggattacagccaagtgctgattacagatgaggaagaaatcaaggctaccaaccccgtggccacagaagaatatggagcagtggccatcaacaaccaggccgccaatacgcaggcgcagaccggactcgtgcacaaccagggggtgattcccggcatggtgtggcagaatagagacgtgtacctgcagggtcccatctgggccaaaattcctcacacggacggcaactttcacccgtctcccctgatgggcggctttggactgaagcacccgcctcctcaaattctcatcaagaacacaccggttccagcggacccgccgcttaccttcaaccaggccaagctgaactctttcatcacgcagtacagcaccggacaggtcagcgtggaaatcgagtgggagctgcagaaagaaaacagcaaacgctggaatccagagattcaatacacttccaactactacaaatctacaaatgtggactttgctgtcaacacggagggggtttatagcgagcctcgccccattggcacccgttacctcacccgcaacctgtaattacatgttaatcaataaaccggttaattcgtttcagttgaactttggtctctgcgaagggcgaattc

SEQ ID NO: 92 - protein, 736 aa, synthetic construct
  REGION 1..736: note = source = /note="Description of Artificial Sequence: Synthetic polypeptide"
MAADGYLPDWLEDNLSEGIREWWDLKPGAPKPKANQQKQDDGRGLVLPGYKYLGPFNGLDKGEPVNAADAAALEHDKAYDQQLKAGDNPYLRYNHADAEFQERLQEDTSFGGNLGRAVFQAKKRVLEPLGLVEEGAKTAPGKKRPVEQSPQEPDSSSGIGKTGQQPAKKRLNFGQTGDSESVPDPQPLGEPPAAPSGLGPNTMASGGGAPMADNNEGADGVGNSSGNWHCDSTWLGDRVITTSTRTWALPTYNNHLYKQISNGTSGGSTNDNTYFGYSTPWGYFDFNRFHCHFSPRDWQRLINNNWGFRPKRLNFKLFNIQVKEVTTNEGTKTIANNLTSTVQVFTDSEYQLPYVLGSAHQGCLPPFPADVFMVPQYGYLTLNNGSQALGRSSFYCLEYFPSQMLRTGNNFQFSYTFEDVPFHSSYAHSQSLDRLMNPLIDQYLYYLVRTQTTGTGGTQTLAFSQAGPSSMANQARNWVPGPCYRQQRVSTTTNQNNNSNFAWTGAAKFKLNGRDSLMNPGVAMASHKDDDDRFFPSSGVLIFGKQGAGNDGVDYSQVLITDEEEIKATNPVATEEYGAVAINNQAANTQAQTGLVHNQGVIPGMVWQNRDVYLQGPIWAKIPHTDGNFHPSPLMGGFGLKHPPPQILIKNTPVPADPPLTFNQAKLNSFITQYSTGQVSVEIEWELQKENSKRWNPEIQYTSNYYKSTNVDFAVNTEGVYSEPRPIGTRYLTRNL

SEQ ID NO: 93 - DNA, 2370 bp, synthetic construct
  misc_feature 1..2370: note = source = /note="Description of Artificial Sequence: Synthetic polynucleotide"
  source 1..2370: mol_type = other DNA
gaattcgccctttctacggctgcgtcaactggaccaatgagaactttcccttcaacgattgcgtcgacaagatggtgatctggtgggaggagggcaagatgacggccaaggtcgtggagtccgccaaggccattctcggcggcagcaaggtgcgcgtggaccaaaagtgcaagtcgtccgcccagatcgaccccacccccgtgatcgtcacctccaacaccaacatgtgcgccgtgattgacgggaacagcaccaccttcgagcaccagcagccgttgcaggaccggatgttcaagttcgaactcacccgccgtctggagcacgactttggcaaggtgaccaagcaggaagtcaaagagttcttccgctgggcgcaggatcacgtgaccgaggtggcgcatgagttctacgtcagaaagggcggagccagcaaaagacccgcccccgatgacgcggatataagcgagcccaagcgggcctgcccctcagtcgcggatccatcgacgtcagacgcggaaggagctccggtggactttgccgacaggtaccaaaacaaatgttctcgtcacgcgggcatgcttcagacgctgtttccctgcaaaacgtgcgagagaatgaatcagaatttcaacatttgcttcacgcacggggtcagagactgctcagaatgtttccccggtgcatcagaatctcaaccggtcgtcagaaaaaaaacgtatcagaaactgtgtgccattcatcatctgctggggcgggcacccgagattgcttgctcggcctgcgatctggtcaacgtggacctggacgactgtgtttctgagcaataaatgacttaaaccaggtatggctgccgatggttatcttccagattggcttgaggacaacctctctgagggcattcgcgagtggtgggacctgaaacctggagccccgaaacccaaagccaaccagcaaaagcaggacgacggccggggtctggtgcttcctggctacaagtacctcggacccttcaacggactcgacaagggggagcccgtcaacgcggcggacgcagcggccctcgagcacgacaaggcctacgaccagcagctcaaagcgggtgacaatccgtacctgcggtataaccacgccgacgccgagtttcaggagcgtctgcaagaagatacgtcttttgggggcaacctcgggcgagcagtcttccaggccaagaagcgggttctcgaacctctcggtctggttgaggaaggcgctaagacggctcctggaaagaagagaccggtagagccatcacctcagcgttcccccgactcctccacgggcatcggcaagaaaggccaccagcccgcgagaaagagactgaactttgggcagactggcgactcggagtcagtccccgaccctcaaccaatcggagaaccaccagcaggcccctctggtctgggatctggtacaatggctgcaggcggtggcgctccaatggcagacaataacgaaggcgccgacggagtgggtagttcctcaggaaattggcattgcgattccacatggctgggcgacagagtcatcaccaccagcacccgaacctgggccctgcccacctacaacaaccatctctacaagcaaatctccaacgggacatcgggaggaagcactaacgacaacacctactttggctacagcaccccctgggggtattttgacttcaacagattccactgccacttctcaccacgtgactggcagcgactcatcaacaataactggggattccggcccaagagactcaacttcaagctcttcaacatccaggtcaaggaggtcacgcagaatgaaggcaccaagaccatcgccaataaccttaccagcacgattcaggtgtttacggactcggaataccagctcccgtacgtcctcggctctgcgcaccagggctgcctccctccgttcccggcggacgtcttcatgattcctcagtacgggtatctgaccctaaacaatggcagtcaggctgtgggccgttcctccttctactgcctggaatacttcccttctcaaatgctgaggacgggcaacaactttgaattcagctacaccttcgaggacgtgcctttccacagcagctacgcgcacagccagagcctggaccggctgatgaaccctctcatcgaccagtacctgtattacttatccagaactcagtccacaggaggaactcaaggtactcagcaattgttattttctcaagccgggcccgcaaacatgtyggctcaggccaagaactggctacctggaccgtgttaccgtcagcaacgagtttccacgacactgtcgcaaaacaacaacagcaattttgctggaccggtgccacca

SEQ ID NO: 94 - protein, 738 aa, synthetic construct; identical to SEQ ID NO: 84
  REGION 1..738: note = source = /note="Description of Artificial Sequence: Synthetic polypeptide"

SEQ ID NO: 95 - DNA, 2205 bp, synthetic construct
  misc_feature 1..2205: note = source = /note="Description of Artificial Sequence: Synthetic polynucleotide"
  source 1..2205: mol_type = other DNA
atgactgacggttaccttccagattggctagaggacaacctctctgaaggcgttcgagagtggtgggcgctgcaacctggagcccctaaacccaaggcaaatcaacaacatcaggacaacgctcggggtcttgtgcttccgggttacaaatacctcggacccggcaacggactcgacaagggggaacccgtcaacgcagcggacgcggcagccctcgagcacgacaaggcctacgaccagcagctcaaggccggtgacaacccctacctcaagtacaaccacgccgacgcggagttccagcagcggcttcagggcgacacatcgtttgggggcaacctcggcagagcagtcttccaggccaaaaagagggttcttgaacctcttggtctggttgagcaagcgggtgagacggctcctggaaagaagagaccgttgattgaatccccccagcagcccgactcctccacgggtatcggcaaaaaaggcaagcagccggctaaaaagaagctcgttttcgaagacgaaactggagcaggcgacggaccccctgagggatcaacttccggagccatgtctgatgacagtgagatgcgtgcagcagctggcggagctgcagtcgagggcggacaaggtgccgatggagtgggtaatgcctcgggtgattggcattgcgattccacctggtctgagggccacgtcacgaccaccagcaccagaacctgggtcttgcccacctacaacaaccacctctacaagcgactcggagagagcctgcagtccaacacctacaacggattctccaccccctggggatactttgacttcaaccgcttccactgccacttctcaccacgtgactggcagcgactcatcaacaacaactggggcatgcgacccaaagccatgcgggtcaaaatcttcaacatccaggtcaaggaggtcacgacgtcgaacggcgagacaacggtggctaataaccttaccagcacggttcagatctttgcggactcgtcgtacgaactgccgtacgtgatggatgcgggtcaagagggcagcctgcctccttttcccaacgacgtctttatggtgccccagtacggctactgtggactggtgaccggcaacacttcgcagcaacagactgacagaaatgccttctactgcctggagtactttccttcgcagatgctgcggactggcaacaactttgaaattacgtacagttttgagaaggtgcctttccactcgatgtacgcgcacagccagagcctggaccggctgatgaaccctctcatcgaccagtacctgtggggactgcaatcgaccaccaccggaaccaccctgaatgccgggactgccaccaccaactttaccaagctgcggcctaccaacttttccaactttaaaaagaactggctgcccgggccttcaatcaagcagcagggcttctcaaagactgccaatcaaaactacaagatccctgccaccgggtcagacagtctcatcaaatacgagacgcacagcactctggacggaagatggagtgccctgacccccggacctccaatggccacggctggacctgcggacagcaagttcagcaacagccagctcatctttgcggggcctaaacagaacggcaacacggccaccgtacccgggactctgatcttcacctctgaggaggagctggcagccaccaacgccaccgatacggacatgtggggcaacctacctggcggtgaccagagcaacagcaacctgccgaccgtggacagactgacagccttgggagccgtgcctggaatggtctggcaaaacagagacatttactaccagggtcccatttgggccaagattcctcataccgatggacactttcacccctcaccgctgattggtgggtttgggctgaaacacccgcctcctcaaatttttatcaagaacaccccggtacctgcgaatcctgcaacgaccttcagctctactccggtaaactccttcattactcagtacagcactggccaggtgtcggtgcagattgactgggagatccagaaggagcggtccaaacgctggaaccccgaggtccagtttacctccaactacggacagcaaaactctctgttgtgggctcccgatgcggctgggaaatacactgagcctagggctatcggtacccgctacctcacccaccacctgtaa

SEQ ID NO: 96 - protein, 734 aa, synthetic construct; identical to SEQ ID NO: 68
  REGION 1..734: note = source = /note="Description of Artificial Sequence: Synthetic polypeptide"

SEQ ID NO: 97 - DNA, 3128 bp, synthetic construct
  misc_feature 1..3128: note = source = /note="Description of Artificial Sequence: Synthetic polynucleotide"
  source 1..3128: mol_type = other DNA
gaattcgccctttctacggctgcgtcaactggaccaatgagaactttcccttcaacgattgcgtcgacaagatgttgatctggtgggaggagggcaagatgacggccaaggtcgtggagtccgccaaggccattctcggcggcagcaaagtgcgcgtggaccaaaagtgcaagccgtccgcccagatcgaccccacccccgtgatcgtcacctccaacaccaacatgtgcgccgtgattgacgggaacagcaccaccttcgagcaccagcagccgttgcgggaccggatgttcaagtttgaactcacccgccgtctggagcacgactttggcaaggtgacaaagcaggaagtcagagagttcttccgctgggcgcaggatcacgtgaccgaggtggcgcacgagttctacgtcagaaagggtggagccaacaagagacccgcccccgatgacgcggataaaagcgagcccaagcgggcctgcccctcagtcgcggatccatcgacgtcagacgcggaaggagctccggtggactttgccgacaggtaccaaaacaaatgttctcgtcacgcgggcatgcttcagatgctgtttccctgcaaaacatgcgagagaatgaatcagaatttcaacatttgcttcacgcacgggaccagagactgttcagaatgtttccccggcgtgtcagaatctcaaccggtcgtcagaaaaaagacgtatcggaaactctgtgcgattcatcatctgctggggcgggcacccgagattgcttgctcggcctgcgatctggtcaacgtggacctagatgactgtgtttctgagcaataaatgacttaaaccaggtatggctgccgatggttatcttccagattggctcgaggacaacctctctgagggcattcgcgagtggtgggacttgaaacctggagccccgaaacccaaagccaaccagcaaaagcaggacgacggccggggtctggtgcttcctggctacaagtacctcggacccttcaacggactcgacaagggggagcccgtcaacgcggcggacgcagcggccctcgagcacgacaaggcctacgaccagcagctcaaagcgggtgacaatccgtacctgcggtataaccacgccgacgccgagtttcaggagcgtctgcaagaagatacgtcttttgggggcaacctcgggcgagcagtcttccaggccaagaagcgggttctcgaacctctcggtctggttgaggaaggcgctaagacggctcctggaaagaagagaccggtagagccatcaccccagcgttctccagactcctctacgggcatcggcaagaaaggccagcagcccgcgaaaaagagactcaactttgggcagactggcgactcagagtcagtgcccgaccctcaaccaatcggagaaccccccgcaggcccctctggtctgggatctggtacaatggctgcaggcggtggcgctccaatggcagacaataacgaaggcgccgacggagtgggtagttcctcaggaaattggcattgcgattccacatggctgggcgacagagtcatcaccaccagcacccgaacctgggccctccccacctacaacaaccacctctacaagcaaatctccaacgggacttcgggaggaagcaccaacgacaacacctacttcggctacagcaccccctgggggtattttgactttaacagattccactgccacttctcaccacgtgactggcagcgactcatcaacaacaactggggattccggcccaagagactcaacttcaagctcttcaacatccaggtcaaggaggtcacgcagaatgaaggcaccaagaccatcgccaataaccttaccagcacgattcaggtctttacggactcggaataccagctcccgtacgtcctcggctctgcgcaccagggctgcctgcctccgttcccggcggacgtcttcatgattcctcagtacgggtacctgactctgaacaatggcagtcaggccgtgggccgttcctccttctactgcctggagtactttccttctcaaatgctgagaacgggcaacaactttgagttcagctaccagtttgaggacgtgccttttcacagcagctacgcgcacagccaaagcctggaccggctgatgaaccccctcatcgaccagtacctgtactacctgtctcggactcagtccacgggaggtaccgcaggaactcagcagttgctattttctcaggccgggcctaataacatgtcggctcaggccaaaaactggctacccgggccctgctaccggcagcaacgcgtctccacgacactgtcgcaaaataacaacagcaactgtaaatcccggtgtcgctatggcaacccacaaggacgacgaagagcgattttgcctggaccggtgccaccaagtatcatctgaatggcagagactctctgttttccgtccagcggagtcttaatgtttgggaaacagggagctggaaaagacaacgtggactatagcagcgttatgctaaccagtgaggaagaaattaaaaccaccaacccagtggccacggaacagtacggcgtggtggccgataacctgcaacagcaaaacgccgctcctattgtaggggccgtcaacagtcaaggagccttacctggcatggtctggcagaaccgggacgtgtacctgcagggtcctatctgggccaagattcctcacacggacggaaactttcatccctcgccgctgatgggaggctttggactgaaacacccgcctcctcagatcctgattaagaatacacctgttcccgcggatcctccaactaccttcagtcaagctaagctggcgtcgttcatcacgcagtacagcaccggacaggtcagcgtggaaattgaatgggagctgcagaaagaaaacagcaaacgctggaacccagagattcaatacacttccaactactacaaatctacaaatgtggacttcgctgttaacacagatggcacttattctgagcctcgccccattggcacccgttacctcacccgtaatctgtaattgctcgttaatcaataaaccggttgattcgtttcagttgaactttggtctctgcgaagggcgaattc

SEQ ID NO: 98 - protein, 738 aa, synthetic construct; identical to SEQ ID NO: 18
  REGION 1..738: note = source = /note="Description of Artificial Sequence: Synthetic polypeptide"

SEQ ID NO: 99 - DNA, 3128 bp, synthetic construct
  misc_feature 1..3128: note = source = /note="Description of Artificial Sequence: Synthetic polynucleotide"
  source 1..3128: mol_type = other DNA
gaattcgccctttctacggctgcgtcaactggaccaatgagaactttcccttcaacgattgcgtcgacaagatggtgatctggtgggaggagggcaagatgacggccaaggtcgtggagtccgccaaggccattctcggcggcagcaaagtgcgcgtggaccaaaagtgcaagtcgtccgcccagatcgaccccacccccgtgatcgtcacctccaacaccaacatgtgcgccgtgattgacgggaacagcaccaccttcgagcaccagcagccgttgcaggaccggatgttcaagtttgaactcacccgccgtctggagcacgactttggcaaggtgacaaagcaggaagtcagagagttcttccgctgggcgcaggatcacgtgaccgaggtggcgcacgagttctacgtcagaaagggtggagccaacaagagacccgcccccgatgacgcggataaaagcgagcccaagcgggcctgcccctcagtcgcggatccatcgacgtcagacgcggaaggagctccggtggactttgccgacaggtaccaaaacaaatgttctcgtcacgcgggcatgcttcagatgctgtttccctgcaaaacatgcgagagaatgaatcagaatttcaacatttgcttcacgcacgggaccagagactgttcagaatgtttccccggcgtgtcagaatctcaaccggttgtcagaaaaaagacgtatcggaaactctgtgcgattcatcatctgctggggcgggcacccgagattgcttgctcggcctgcgatctggtcaacgtggacctagatgactgtgtttctgagcaataaatgacttaaaccaggtatggctgccgatggttatcttccagattggctcgaggacaacctctctgagggcattcgcgagtggtgggacttgaaacctggagccccgaaacccaaagccaaccagcaaaagcaggacgacggccggggtctggtgcttcctggctacaagtacctcggacccttcaacggactcgacaagggggagcccgtcaacgcggcggacgcagcggccctcgagcacgacaaggcctacgaccagcagctcaaagcgggtgacaatccgtacctgcggtataaccacgccgacgccgagtttcaggagcgtctgcaagaagatacgtcttttgggggcaacctcgggcgagcagtcttccaggccaagaagcgggttctcgaacctctcggtctggttgaggaaggcgctaagacggctcctggaaagaagagaccggtagagccatcaccccagcgttctccagactcctctacgggcatcggcaagaaaggccagcagcccgcgaaaaagagactcaactttgggcagactggcgactcagagtcagtgcccgaccctcaaccaatcggagaaccccccgcaggcccctctggtctgggatctggtacaatggctgcaggcggtggcgctccaatggcagacaataacgaaggcgccgacggagtgggtagttcctcaggaaattggcattgcgattccacatggctgggcgacagagtcatcaccaccagcacccgaacctgggccctccccacctacaacaaccacctctacaagcaaatctccaacgggacttcgggaggaagcaccaacgacaacacctacttcggctacagcaccccctgggggtattttgactttaacagattccactgccacttctcaccacgtgactggcagcgactcatcaacaacaactggggattccggcccaagagacccaacttcaagctcttcaacatccaggtcaaggaggtcacgcagaatgaaggcaccaagaccatcgccaataaccttaccagcacgattcaggtctttacggactcggaataccagctcccgtacgtcctcggctctgcgcaccagggctgcctgcctccgttcccggcggacgtcttcatgattcctcagtacgggtacctgactctgaacaatggcagtcaggccgtgggccgttcctccttctactgcctggagtactttccttctcaaatgctgagaacgggcaacaactttgagttcagctaccagtttgaggacgtgccttttcacagcagctacgcgcacagccaaagcctggaccggctgatgaaccccctcatcgaccagtacctgtactacctgtctcggactcagtccacgggaggtaccgcaggaactcagcagttgctattttctcaggccgggcctaataacatgtcggctcaggccaaaaactggctacccgggccctgctaccggcagcaacgcgtctccacgacactgtcgcaaaataacaacagcaactttgcctggaccggtgccaccaagtatcatctgaatggcagagactctctggtaaatcccggtgtcgctatggcaacccacaaggacgacgaagagcgattttttccgtccagcggagtcttaatgtttgggaaacagggagctggaaaagacaacgtggactatagcagcgttatgctaaccagtgaggaagaaattaaaaccaccaacccagtggccacagaacagtacggcgtggtggccgataacctgcaacagcaaaacgccgctcctattgtaggggccgtcaacagtcaaggagccttacctggcatggtctggcagaaccgggacgtgtacctgcagggtcctatctgggccaagattcctcacacggacggaaactttcatccctcgccgctgatgggaggctttggactgaaacacccgcctcctcagatcctgattaagaatacacctgttcccgcggatcctccaactaccttcagtcaagctaagctggcgtcgttcatcacgcagtacagcaccggacaggtcagcgtggaaattgaatgggagctgcagaaagaaaacagcaaacgctggaacccagagattcaatacacttccaactactacaaatctacaaatgtggactttgctgttaacacagatggcacttattctgagcctcgccccattggcacccgttacctcacccgtaatctgtaattgcttgttaatcaataaaccggttgattcgtttcagttgaactttggtctctgcgaagggcgaattc

SEQ ID NO: 100 - protein, 738 aa, synthetic construct
  REGION 1..738: note = source = /note="Description of Artificial Sequence: Synthetic polypeptide"
MAADGYLPDWLEDNLSEGIREWWDLKPGAPKPKANQQKQDDGRGLVLPGYKYLGPFNGLDKGEPVNAADAAALEHDKAYDQQLKAGDNPYLRYNHADAEFQERLQEDTSFGGNLGRAVFQAKKRVLEPLGLVEEGAKTAPGKKRPVEPSPQRSPDSSTGIGKKGQQPAKKRLNFGQTGDSESVPDPQPIGEPPAGPSGLGSGTMAAGGGAPMADNNEGADGVGSSSGNWHCDSTWLGDRVITTSTRTWALPTYNNHLYKQISNGTSGGSTNDNTYFGYSTPWGYFDFNRFHCHFSPRDWQRLINNNWGFRPKRPNFKLFNIQVKEVTQNEGTKTIANNLTSTIQVFTDSEYQLPYVLGSAHQGCLPPFPADVFMIPQYGYLTLNNGSQAVGRSSFYCLEYFPSQMLRTGNNFEFSYQFEDVPFHSSYAHSQSLDRLMNPLIDQYLYYLSRTQSTGGTAGTQQLLFSQAGPNNMSAQAKNWLPGPCYRQQRVSTTLSQNNNSNFAWTGATKYHLNGRDSLVNPGVAMATHKDDEERFFPSSGVLMFGKQGAGKDNVDYSSVMLTSEEEIKTTNPVATEQYGVVADNLQQQNAAPIVGAVNSQGALPGMVWQNRDVYLQGPIWAKIPHTDGNFHPSPLMGGFGLKHPPPQILIKNTPVPADPPTTFSQAKLASFITQYSTGQVSVEIEWELQKENSKRWNPEIQYTSNYYKSTNVDFAVNTDGTYSEPRPIGTRYLTRNL

SEQ ID NO: 101 - protein, 738 aa, synthetic construct
  REGION 1..738: note = source = /note="Description of Artificial Sequence: Synthetic polypeptide"
MAADGYLPDWLEDNLSEGIREWWDLKPGAPKPKANQQKQDDGRGLVLPGYKYLGPFNGLDKGEPVNAADAAALEHDKAYDQQLKAGDNPYLRYNHADAEFQERLQEDTSFGGNLGRAVFQAKKRVLEPLGLVEEAAKTAPGKKRPVEPSPQRSPDSSTGIGKKGQQPAKKRLNFGQTGDSESVPDPQPIGEPPAGPSGLGSGTMAAGGGAPMADNNEGADGVGSSSGNWHCDSTWLGDRVITTSTRTWALPTYNNHLYKQISNGTSGGSTNDNTYFGYSTPWGYFDFNRFHCHFSPRDWQRLINNNWGFRPKRLSFKLFNIQVKEVTQNEGTKTIANNLTSTIQVFTDSEYQLPYVLGSAHQGCLPPFPADVFMIPQYGYLTLNNGSQAVGRSSFYCLEYFPSQMLRTGNNFEFSYTFEDVPFHSSYAHSQSLDRLMNPLIDQYLYYLSRTQSTGGTQGTQQLLFSQAGPANMSAQAKNWLPGPCYRQQRVSTTLSQNNNSNFAWTGATKYHLNGRDSLVNPGVAMATHKDDEERFFPSSGVLMFGKQGAGRDNVDYSSVMLTSEEEIKTTNPVATEQYGVVADNLQQTNTGPIVGNVNSQGALPGMVWQNRDVYLQGPIWAKIPHTDGNFHPSPLMGGFGLKHPPPQILIKNTPVPADPPTTFSQAKLASFITQYSTGQVSVEIEWELQKENSKRWNPEIQYTSNYYKSTNVDFAVNTEGTYSEPRPIGTRYLTRNL

SEQ ID NO: 102 - DNA, 2172 bp, synthetic construct
  misc_feature 1..2172: note = source = /note="Description of Artificial Sequence: Synthetic polynucleotide"
  source 1..2172: mol_type = other DNA
atgtcttttgttgatcaccctccagattggttggaagaagttggtgaaggtcttcgcgagtttttgggccttgaagcgggcccaccgaaaccaaaacccaatcagcagcatcaagatcaagcccgtggtcttgtgctgcctggttataactatctcggacccggaaacggtctcgatcgaggagagcctgtcaacagggcagacgaggtcgcgcgagagcacgacatctcgtacaacgagcagcttgaggcgggagacaacccctacctcaagtacaaccacgcggacgccgagtttcaggagaagctcgccgacgacacatccttcgggggaaacctcggaaaggcagtctttcaggccaagaaaagggttctcgaaccttttggcctggttgaagagggtgctaagacggcccctaccggaaagcggatagacgaccactttccaaaaagaaagaaggctcggaccgaagaggactccaagccttccacctcgtcagacgccgaagctggacccagcggatcccagcagctgcaaatcccagcccaaccagcctcaagtttgggagctgatacaatgtctgcgggaggtggcggcccattgggcgacaataaccaaggtgccgatggagtgggcaatgcctcgggagattggcattgcgattccacgtggatgggggacagagtcgtcaccaagtccacccgaacctgggtgctgcccagctacaacaaccaccagtaccgagagatcaaaagcggctccgtcgacggaagcaacgccaacgcctactttggatacagcaccccctgggggtactttgactttaaccgcttccacagccactggagcccccgagactggcaaagactcatcaacaactactggggcttcagaccccggtccctcagagtcaaaatcttcaacattcaagtcaaagaggtcacggtgcaggactccaccaccaccatcgccaacaacctcacctccaccgtccaagtgtttacggacgacgactaccagctgccctacgtcgtcggcaacgggaccgagggatgcctgccggccttccctccgcaggtctttacgctgccgcagtacggttacgcgacgctgaaccgcgacaacacagaaaatcccaccgagaggagcagcttcttctgcctagagtactttcccagcaagatgctgagaacgggcaacaactttgagtttacctacaactttgaggaggtgcccttccactccagcttcgctcccagtcagaacctgttcaagctggccaacccgctggtggaccagtacttgtaccgcttcgtgagcacaaataacactggcggagtccagttcaacaagaacctggccgggagatacgccaacacctacaaaaactggttcccggggcccatgggccgaacccagggctggaacctgggctccggggtcaaccgcgccagtgtcagcgccttcgccacgaccaataggatggagctcgagggcgcgagttaccaggtgcccccgcagccgaacggcatgaccaacaacctccagggcagcaacacctatgccctggagaacactatgatcttcaacagccagccggcgaacccgggcaccaccgccacgtacctcgagggcaacatgctcatcaccagcgagagcgagacgcagccggtgaaccgcgtggcgtacaacgtcggcgggcagatggccaccaacaaccagagctccaccactgcccccgcgaccggcacgtacaacctccaggaaatcgtgcccggcagcgtgtggatggagagggacgtgtacctccaaggacccatctgggccaagatcccagagacgggggcgcactttcacccctctccggccatgggcggattcggactcaaacacccaccgcccatgatgctcatcaagaacacgcctgtgcccggaaatatcaccagcttctcggacgtgcccgtcagcagcttcatcacccagtacagcaccgggcaggtcaccgtggagatggagtgggagctcaagaaggaaaactccaagaggtggaacccagagatccagtacacaaacaactacaacgacccccagtttgtggactttgccccggacagcaccggggaatacagaaccaccagacctatcggaacccgataccttacccgacccctt

SEQ ID NO: 103 - protein, 720 aa, synthetic construct
  REGION 1..720: note = source = /note="Description of Artificial Sequence: Synthetic polypeptide"
MSFVDHPPDWLEEVGEGLREFLGLEAGPPKPKPNQQHQDQARGLVLPGYNYLGPGNGLDRGEPVNRADEVAREHDISYNEQLEAGDNPYLKYNHADAEFQEKLADDTSFGGNLGKAVFQAKKRVLEPFGLVEEGAKTAPTGKRIDDHFPKRKKARTEEDSKPSTSSDAEAGPSGSQQLQIPAQPASSLGADTMSAGGGGPLGDNNQGADGVGNASGDWHCDSTWMGDRVVTKSTRTWVLPSYNNHQYREIKSGSVDGSNANAYFGYSTPWGYFDFNRFHSHWSPRDWQRLINNYWGFRPRSLRVKIFNIQVKEVTVQDSTTTIANNLTSTVQVFTDDDYQLPYVVGNGTEGCLPAFPPQVFTLPQYGYATLNRDNTENPTERSSFFCLEYFPSKMLRTGNNFEFTYNFEEVPFHSSFAPSQNLFKLANPLVDQYLYRFVSTNNTGGVQFNKNLAGRYANTYKNWFPGPMGRTQGWNLGSGVNRASVSAFATTNRMELEGASYQVPPQPNGMTNNLQGSNTYALENTMIFNSQPANPGTTATYLEGNMLITSESETQPVNRVAYNVGGQMATNNQSSTTAPATGTYNLQEIVPGSVWMERDVYLQGPIWAKIPETGAHFHPSPAMGGFGLKHPPPMMLIKNTPVPGNITSFSDVPVSSFITQYSTGQVTVEMEWELKKENSKRWNPEIQYTNNYNDPQFVDFAPDSTGEYRTTRPIGTRYL

SEQ ID NO: 104 - protein, 724 aa, Adeno-associated virus 5
MSFVDHPPDWLEEVGEGLREFLGLEAGPPKPKPNQQHQDQARGLVLPGYNYLGPGNGLDRGEPVNRADEVAREHDISYNEQLEAGDNPYLKYNHADAEFQEKLADDTSFGGNLGKAVFQAKKRVLEPFGLVEEGAKTAPTGKRIDDHFPKRKKARTEEDSKPSTSSDAEAGPSGSQQLQIPAQPASSLGADTMSAGGGGPLGDNNQGADGVGNASGDWHCDSTWMGDRVVTKSTRTWVLPSYNNHQYREIKSGSVDGSNANAYFGYSTPWGYFDFNRFHSHWSPRDWQRLINNYWGFRPRSLRVKIFNIQVKEVTVQDSTTTIANNLTSTVQVFTDDDYQLPYVVGNGTEGCLPAFPPQVFTLPQYGYATLNRDNTENPTERSSFFCLEYFPSKMLRTGNNFEFTYNFEEVPFHSSFAPSQNLFKLANPLVDQYLYRFVSTNNTGGVQFNKNLAGRYANTYKNWFPGPMGRTQGWNLGSGVNRASVSAFATTNRMELEGASYQVPPQPNGMTNNLQGSNTYALENTMIFNSQPANPGTTATYLEGNMLITSESETQPVNRVAYNVGGQMATNNQSSTTAPATGTYNLQEIVPGSVWMERDVYLQGPIWAKIPETGAHFHPSPAMGGFGLKHPPPMMLIKNTPVPGNITSFSDVPVSSFITQYSTGQVTVEMEWELKKENSKRWNPEIQYTNNYNDPQFVDFAPDSTGEYRTTRPIGTRYLTRPL

SEQ ID NO: 105 - DNA, 2175 bp, synthetic construct
  misc_feature 1..2175: note = source = /note="Description of Artificial Sequence: Synthetic polynucleotide"
  source 1..2175: mol_type = other DNA
atgtcttttgttgatcaccctccagattggttggaagaagttggtgaaggtcttcgcgagtttttgggccttgaagcgggcccaccgaaaccaaaacccaatcagcagcatcaagatcaagcccgtggtcttgtgctgcctggttataactatctcggacccggaaacggtctcgatcgaggagagcctgtcaacagggcagacgaggtcgcgcgagagcacgacatctcgtacaacgagcagcttgaggcgggagacaacccctacctcaagtacaaccacgcggacgccgagtttcaggagaagctcgccgacgacacatccttcgggggaaacctcggaaaggcagtctttcaggccaagaaaagggttctcgaaccttttggcctggttgaagagggtgctaagacggcccctaccggaaagcggatagacgaccactttccaaaaagaaagaaggctcggaccgaagaggactccaagccttccacctcgtcagacgccgaagctggacccagcggatcccagcagctgcaaatcccagcccaaccagcctcaagtttgggagctgatacaatgtctgcgggaggtggcggcccattgggcgacaataaccaaggtgccgatggagtgggcaatgcctcgggagattggcattgcgattccacgtggatgggggacagagtcgtcaccaagtccacccgaacctgggtgctgcccagctacaacaaccaccagtaccgagagatcaaaagcggctccgtcgacggaagcaacgccaacgcctactttggatacagcaccccctgggggtactttgactttaaccgcttccacagccactggagcccccgagactggcaaagactcatcaacaactactggggcttcagaccccggtccctcagagtcaaaatcttcaacattcaagtcaaagaggtcacggtgcaggactccaccaccaccatcgccaacaacctcacctccaccgtccaagtgtttacggacgacgactaccagctgccctacgtcgtcggcaacgggaccgagggatgcctgccggccttccctccgcaggtctttacgctgccgcagtacggttacgcgacgctgaaccgcgacaacacagaaaatcccaccgagaggagcagcttcttctgcctagagtactttcccagcaagatgctgagaacgggcaacaactttgagtttacctacaactttgaggaggtgcccttccactccagcttcgctcccagtcagaacctgttcaagctggccaacccgctggtggaccagtacttgtaccgcttcgtgagcacaaataacactggcggagtccagttcaacaagaacctggccgggagatacgccaacacctacaaaaactggttcccggggcccatgggccgaacccagggctggaacctgggctccggggtcaaccgcgccagtgtcagcgccttcgccacgaccaataggatggagctcgagggcgcgagttaccaggtgcccccgcagccgaacggcatgaccaacaacctccagggcagcaacacctatgccctggagaacactatgatcttcaacagccagccggcgaacccgggcaccaccgccacgtacctcgagggcaacatgctcatcaccagcgagagcgagacgcagccggtgaaccgcgtggcgtacaacgtcggcgggcagatggccaccaacaaccagagctccaccactgcccccgcgaccggcacgtacaacctccaggaaatcgtgcccggcagcgtgtggatggagagggacgtgtacctccaaggacccatctgggccaagatcccagagacgggggcgcactttcacccctctccggccatgggcggattcggactcaaacacccaccgcccatgatgctcatcaagaacacgcctgtgcccggaaatatcaccagcttctcggacgtgcccgtcagcagcttcatcacccagtacagcaccgggcaggtcaccgtggagatggagtgggagctcaagaaggaaaactccaagaggtggaacccagagatccagtacacaaacaactacaacgacccccagtttgtggactttgccccggacagcaccggggaatacagaaccaccagacctatcggaacccgataccttacccgacccctttaa

SEQ ID NO: 106 - DNA, 2208 bp, synthetic construct
  misc_feature 1..2208: note = source = /note="Description of Artificial Sequence: Synthetic polynucleotide"
  source 1..2208: mol_type = other DNA
atggctgccgatggttatcttccagattggctcgaggacaacctctctgagggcattcgcgagtggtgggacttgaaacctggagccccgaaacccaaagccaaccagcaaaagcaggacgacggccggggtctggtgcttcctggctacaagtacctcggacccttcaacggactcgacaagggggagcccgtcaacgcggcggatgcagcggccctcgagcacgacaaggcctacgaccagcagctcaaagcgggtgacaatccgtacctgcggtataaccacgccgacgccgagtttcaggagcgtctgcaagaagatacgtcttttgggggcaacctcgggcgagcagtcttccaggccaagaagagggttctcgaaccttttggtctggttgaggaaggtgctaagacggctcctggaaagaaacgtccggtagagcagtcgccacaagagccagactcctcctcgggcattggcaagacaggccagcagcccgctaaaaagagactcaattttggtcagactggcgactcagagtcagtccccgacccacaacctctcggagaacctccagcaacccccgctgctgtgggacctactacaatggcttcaggcggtggcgcaccaatggcagacaataacgaaggcgccgacggagtgggtaatgcctcaggaaattggcattgcgattccacatggctgggcgacagagtcatcaccaccagcacccgaacatgggccttgcccacctataacaaccacctctacaagcaaatctccagtgcttcaacgggggccagcaacgacaaccactacttcggctacagcaccccctgggggtattttgatttcaacagattccactgccatttctcaccacgtgactggcagcgactcatcaacaacaattggggattccggcccaagagactcaacttcaagctcttcaacatccaagtcaaggaggtcacgacgaatgatggcgtcacgaccatcgctaataaccttaccagcacggttcaagtcttctcggactcggagtaccagttgccgtacgtcctcggctctgcgcaccagggctgcctccctccgttcccggcggacgtgttcatgattccgcagtacggctacctaacgctcaacaatggcagccaggcagtgggacggtcatccttttactgcctggaatatttcccatcgcagatgctgagaacgggcaataactttaccttcagctacaccttcgaggacgtgcctttccacagcagctacgcgcacagccagagcctggaccggctgatgaatcctctcatcgaccagtacctgtattacctgaacagaactcagaatcagtccggaagtgcccaaaacaaggacttgctgtttagccgggggtctccagctggcatgtctgttcagcccaaaaactggctacctggaccctgttaccggcagcagcgcgtttctaaaacaaaaacagacaacaacaacagcaactttacctggactggtgcttcaaaatataaccttaatgggcgtgaatctataatcaaccctggcactgctatggcctcacacaaagacgacaaagacaagttctttcccatgagcggtgtcatgatttttggaaaggagagcgccggagcttcaaacactgcattggacaatgtcatgatcacagacgaagaggaaatcaaagccactaaccccgtggccaccgaaagatttgggactgtggcagtcaatctccagagcagcagcacagaccctgcgaccggagatgtgcatgttatgggagccttacctggaatggtgtggcaagacagagacgtatacctgcagggtcctatttgggccaaaattcctcacacggatggacactttcacccgtctcctctcatgggcggctttggacttaagcacccgcctcctcagatcctcatcaaaaacacgcctgttcctgcgaatcctccggcagagttttcggctacaaagtttgcttcattcatcacccagtattccacaggacaagtgagcgtggagattgaatgggagctgcagaaagaaaacagcaaacgctggaatcccgaagtgcagtatacatctaactatgcaaaatctgccaacgttgatttcactgtggacaacaatggactttatactgagcctcgccccattggcacccgttacctcacccgtcccctg

SEQ ID NO: 107 - protein, 736 aa, Adeno-associated virus 6
MAADGYLPDWLEDNLSEGIREWWDLKPGAPKPKANQQKQDDGRGLVLPGYKYLGPFNGLDKGEPVNAADAAALEHDKAYDQQLKAGDNPYLRYNHADAEFQERLQEDTSFGGNLGRAVFQAKKRVLEPFGLVEEGAKTAPGKKRPVEQSPQEPDSSSGIGKTGQQPAKKRLNFGQTGDSESVPDPQPLGEPPATPAAVGPTTMASGGGAPMADNNEGADGVGNASGNWHCDSTWLGDRVITTSTRTWALPTYNNHLYKQISSASTGASNDNHYFGYSTPWGYFDFNRFHCHFSPRDWQRLINNNWGFRPKRLNFKLFNIQVKEVTTNDGVTTIANNLTSTVQVFSDSEYQLPYVLGSAHQGCLPPFPADVFMIPQYGYLTLNNGSQAVGRSSFYCLEYFPSQMLRTGNNFTFSYTFEDVPFHSSYAHSQSLDRLMNPLIDQYLYYLNRTQNQSGSAQNKDLLFSRGSPAGMSVQPKNWLPGPCYRQQRVSKTKTDNNNSNFTWTGASKYNLNGRESIINPGTAMASHKDDKDKFFPMSGVMIFGKESAGASNTALDNVMITDEEEIKATNPVATERFGTVAVNLQSSSTDPATGDVHVMGALPGMVWQDRDVYLQGPIWAKIPHTDGHFHPSPLMGGFGLKHPPPQILIKNTPVPANPPAEFSATKFASFITQYSTGQVSVEIEWELQKENSKRWNPEVQYTSNYAKSANVDFTVDNNGLYTEPRPIGTRYLTRPL

SEQ ID NO: 108 - protein, 623 aa, Adeno-associated virus 6
MPGFYEIVIKVPSDLDEHLPGISDSFVNWVAEKEWELPPDSDMDLNLIEQAPLTVAEKLQRDFLVQWRRVSKAPEALFFVQFEKGESYFHLHILVETTGVKSMVLGRFLSQIRDKLVQTIYRGIEPTLPNWFAVTKTRNGAGGGNKVVDECYIPNYLLPKTQPELQWAWTNMEEYISACLNLAERKRLVAHDLTHVSQTQEQNKENLNPNSDAPVIRSKTSARYMELVGWLVDRGITSEKQWIQEDQASYISFNAASNSRSQIKAALDNAGKIMALTKSAPDYLVGPAPPADIKTNRIYRILELNGYDPAYAGSVFLGWAQKRFGKRNTIWLFGPATTGKTNIAEAIAHAVPFYGCVNWTNENFPFNDCVDKMVIWWEEGKMTAKVVESAKAILGGSKVRVDQKCKSSAQIDPTPVIVTSNTNMCAVIDGNSTTFEHQQPLQDRMFKFELTRRLEHDFGKVTKQEVKEFFRWAQDHVTEVAHEFYVRKGGANKRPAPDDADKSEPKRACPSVADPSTSDAEGAPVDFADRYQNKCSRHAGMLQMLFPCKTCERMNQNFNICFTHGTRDCSECFPGVSESQPVVRKRTYRKLCAIHHLLGRAPEIACSACDLVNVDLDDCVSEQ

SEQ ID NO: 109 - DNA, 4683 bp, Adeno-associated virus 6
  source 1..4683: mol_type = unassigned DNA
ttggccactccctctctgcgcgctcgctcgctcactgaggccgggcgaccaaaggtcgcccgacgcccgggctttgcccgggcggcctcagtgagcgagcgagcgcgcagagagggagtggccaactccatcactaggggttcctggaggggtggagtcgtgacgtgaattacgtcatagggttagggaggtcctgtattagaggtcacgtgagtgttttgcgacattttgcgacaccatgtggtcacgctgggtatttaagcccgagtgagcacgcagggtctccattttgaagcgggaggtttgaacgcgcagcgccatgccggggttttacgagattgtgattaaggtccccagcgaccttgacgagcatctgcccggcatttctgacagctttgtgaactgggtggccgagaaggaatgggagttgccgccagattctgacatggatctgaatctgattgagcaggcacccctgaccgtggccgagaagctgcagcgcgacttcctggtccagtggcgccgcgtgagtaaggccccggaggccctcttctttgttcagttcgagaagggcgagtcctacttccacctccatattctggtggagaccacgggggtcaaatccatggtgctgggccgcttcctgagtcagattagggacaagctggtgcagaccatctaccgcgggatcgagccgaccctgcccaactggttcgcggtgaccaagacgcgtaatggcgccggaggggggaacaaggtggtggacgagtgctacatccccaactacctcctgcccaagactcagcccgagctgcagtgggcgtggactaacatggaggagtatataagcgcgtgtttaaacctggccgagcgcaaacggctcgtggcgcacgacctgacccacgtcagccagacccaggagcagaacaaggagaatctgaaccccaattctgacgcgcctgtcatccggtcaaaaacctccgcacgctacatggagctggtcgggtggctggtggaccggggcatcacctccgagaagcagtggatccaggaggaccaggcctcgtacatctccttcaacgccgcctccaactcgcggtcccagatcaaggccgctctggacaatgccggcaagatcatggcgctgaccaaatccgcgcccgactacctggtaggccccgctccgcccgccgacattaaaaccaaccgcatttaccgcatcctggagctgaacggctacgaccctgcctacgccggctccgtctttctcggctgggcccagaaaaggttcggaaaacgcaacaccatctggctgtttgggccggccaccacgggcaagaccaacatcgcggaagccatcgcccacgccgtgcccttctacggctgcgtcaactggaccaatgagaactttcccttcaacgattgcgtcgacaagatggtgatctggtgggaggagggcaagatgacggccaaggtcgtggagtccgccaaggccattctcggcggcagcaaggtgcgcgtggaccaaaagtgcaagtcgtccgcccagatcgatcccacccccgtgatcgtcacctccaacaccaacatgtgcgccgtgattgacgggaacagcaccaccttcgagcaccagcagccgttgcaggaccggatgttcaaatttgaactcacccgccgtctggagcatgactttggcaaggtgacaaagcaggaagtcaaagagttcttccgctgggcgcaggatcacgtgaccgaggtggcgcatgagttctacgtcagaaagggtggagccaacaagagacccgcccccgatgacgcggataaaagcgagcccaagcgggcctgcccctcagtcgcggatccatcgacgtcagacgcggaaggagctccggtggactttgccgacaggtaccaaaacaaatgttctcgtcacgcgggcatgcttcagatgctgtttccctgcaaaacatgcgagagaatgaatcagaatttcaacatttgcttcacgcacgggaccagagactgttcagaatgtttccccggcgtgtcagaatctcaaccggtcgtcagaaagaggacgtatcggaaactctgtgccattcatcatctgctggggcgggctcccgagattgcttgctcggcctgcgatctggtcaacgtggatctggatgactgtgtttctgagcaataaatgacttaaaccaggtatggctgccgatggttatcttccagattggctcgaggacaacctctctgagggcattcgcgagtggtgggacttgaaacctggagccccgaaacccaaagccaaccagcaaaagcaggacgacggccggggtctggtgcttcctggctacaagtacctcggacccttcaacggactcgacaagggggagcccgtcaacgcggcggatgcagcggccctcgagcacgacaaggcctacgaccagcagctcaaagcgggtgacaatccgtacctgcggtataaccacgccgacgccgagtttcaggagcgtctgcaagaagatacgtcttttgggggcaacctcgggcgagcagtcttccaggccaagaagagggttctcgaaccttttggtctggttgaggaaggtgctaagacggctcctggaaagaaacgtccggtagagcagtcgccacaagagccagactcctcctcgggcattggcaagacaggccagcagcccgctaaaaagagactcaattttggtcagactggcgactcagagtcagtccccgacccacaacctctcggagaacctccagcaacccccgctgctgtgggacctactacaatggcttcaggcggtggcgcaccaatggcagacaataacgaaggcgccgacggagtgggtaatgcctcaggaaattggcattgcgattccacatggctgggcgacagagtcatcaccaccagcacccgaacatgggccttgcccacctataacaaccacctctacaagcaaatctccagtgcttcaacgggggccagcaacgacaaccactacttcggctacagcaccccctgggggtattttgatttcaacagattccactgccatttctcaccacgtgactggcagcgactcatcaacaacaattggggattccggcccaagagactcaacttcaagctcttcaacatccaagtcaaggaggtcacgacgaatgatggcgtcacgaccatcgctaataaccttaccagcacggttcaagtcttctcggactcggagtaccagttgccgtacgtcctcggctctgcgcaccagggctgcctccctccgttcccggcggacgtgttcatgattccgcagtacggctacctaacgctcaacaatggcagccaggcagtgggacggtcatccttttactgcctggaatatttcccatcgcagatgctgagaacgggcaataactttaccttcagctacaccttcgaggacgtgcctttccacagcagctacgcgcacagccagagcctggaccggctgatgaatcctctcatcgaccagtacctgtattacctgaacagaactcagaatcagtccggaagtgcccaaaacaaggacttgctgtttagccgggggtctccagctggcatgtctgttcagcccaaaaactggctacctggaccctgttaccggcagcagcgcgtttctaaaacaaaaacagacaacaacaacagcaactttacctggactggtgcttcaaaatataaccttaatgggcgtgaatctataatcaaccctggcactgctatggcctcacacaaagacgacaaagacaagttctttcccatgagcggtgtcatgatttttggaaaggagagcgccggagcttcaaacactgcattggacaatgtcatgatcacagacgaagaggaaatcaaagccactaaccccgtggccaccgaaagatttgggactgtggcagtcaatctccagagcagcagcacagaccctgcgaccggagatgtgcatgttatgggagccttacctggaatggtgtggcaagacagagacgtatacctgcagggtcctatttgggccaaaattcctcacacggatggacactttcacccgtctcctctcatgggcggctttggacttaagcacccgcctcctcagatcctcatcaaaaacacgcctgttcctgcgaatcctccggcagagttttcggctacaaagtttgcttcattcatcacccagtattccacaggacaagtgagcgtggagattgaatgggagctgcagaaagaaaacagcaaacgctggaatcccgaagtgcagtatacatctaactatgcaaaatctgccaacgttgatttcactgtggacaacaatggactttatactgagcctcgccccattggcacccgttacctcacccgtcccctgtaattgtgtgttaatcaataaaccggttaattcgtgtcagttgaactttggtctcatgtcgttattatcttatctggtcaccatagcaaccggttacacattaactgcttagttgcgcttcgcgaatacccctagtgatggagttgcccactccctctatgcgcgctcgctcgctcggtggggccggcagagcagagctctgccgtctgcggacctttggtccgcaggccccaccgagcgagcgagcgcgcatagagggagtgggcaa

SEQ ID NO: 110 - DNA, 2211 bp, synthetic construct
  misc_feature 1..2211: note = source = /note="Description of Artificial Sequence: Synthetic polynucleotide"
  source 1..2211: mol_type = other DNA
atggctgccgatggttatcttccagattggctcgaggacaacctctctgagggcattcgcgagtggtgggacttgaaacctggagccccgaaacccaaagccaaccagcaaaagcaggacgacggccggggtctggtgcttcctggctacaagtacctcggacccttcaacggactcgacaagggggagcccgtcaacgcggcggatgcagcggccctcgagcacgacaaggcctacgaccagcagctcaaagcgggtgacaatccgtacctgcggtataaccacgccgacgccgagtttcaggagcgtctgcaagaagatacgtcttttgggggcaacctcgggcgagcagtcttccaggccaagaagagggttctcgaaccttttggtctggttgaggaaggtgctaagacggctcctggaaagaaacgtccggtagagcagtcgccacaagagccagactcctcctcgggcattggcaagacaggccagcagcccgctaaaaagagactcaattttggtcagactggcgactcagagtcagtccccgacccacaacctctcggagaacctccagcaacccccgctgctgtgggacctactacaatggcttcaggcggtggcgcaccaatggcagacaataacgaaggcgccgacggagtgggtaatgcctcaggaaattggcattgcgattccacatggctgggcgacagagtcatcaccaccagcacccgaacatgggccttgcccacctataacaaccacctctacaagcaaatctccagtgcttcaacgggggccagcaacgacaaccactacttcggctacagcaccccctgggggtattttgatttcaacagattccactgccatttctcaccacgtgactggcagcgactcatcaacaacaattggggattccggcccaagagactcaacttcaagctcttcaacatccaagtcaaggaggtcacgacgaatgatggcgtcacgaccatcgctaataaccttaccagcacggttcaagtcttctcggactcggagtaccagttgccgtacgtcctcggctctgcgcaccagggctgcctccctccgttcccggcggacgtgttcatgattccgcagtacggctacctaacgctcaacaatggcagccaggcagtgggacggtcatccttttactgcctggaatatttcccatcgcagatgctgagaacgggcaataactttaccttcagctacaccttcgaggacgtgcctttccacagcagctacgcgcacagccagagcctggaccggctgatgaatcctctcatcgaccagtacctgtattacctgaacagaactcagaatcagtccggaagtgcccaaaacaaggacttgctgtttagccgggggtctccagctggcatgtctgttcagcccaaaaactggctacctggaccctgttaccggcagcagcgcgtttctaaaacaaaaacagacaacaacaacagcaactttacctggactggtgcttcaaaatataaccttaatgggcgtgaatctataatcaaccctggcactgctatggcctcacacaaagacgacaaagacaagttctttcccatgagcggtgtcatgatttttggaaaggagagcgccggagcttcaaacactgcattggacaatgtcatgatcacagacgaagaggaaatcaaagccactaaccccgtggccaccgaaagatttgggactgtggcagtcaatctccagagcagcagcacagaccctgcgaccggagatgtgcatgttatgggagccttacctggaatggtgtggcaagacagagacgtatacctgcagggtcctatttgggccaaaattcctcacacggatggacactttcacccgtctcctctcatgggcggctttggacttaagcacccgcctcctcagatcctcatcaaaaacacgcctgttcctgcgaatcctccggcagagttttcggctacaaagtttgcttcattcatcacccagtattccacaggacaagtgagcgtggagattgaatgggagctgcagaaagaaaacagcaaacgctggaatcccgaagtgcagtatacatctaactatgcaaaatctgccaacgttgatttcactgtggacaacaatggactttatactgagcctcgccccattggcacccgttacctcacccgtcccctgtaa

SEQ ID NO: 111 - protein, 736 aa, synthetic construct; identical to SEQ ID NO: 107
  REGION 1..736: note = source = /note="Description of Artificial Sequence: Synthetic polypeptide"

SEQ ID NO: 112 - protein, 736 aa, synthetic construct
  REGION 1..736: note = source = /note="Description of Artificial Sequence: Synthetic polypeptide"
MAADGYLPDWLEDNLSEGIREWWDLKPGAPKPKANQQKQDDGRGLVLPGYKYLGPFNGLDKGEPVNAADAAALEHDKAYDQQLKAGDNPYLRYNHADAEFQERLQEDTSFGGNLGRAVFQAKKRVLEPFGLVEEGAKTAPGKKRPVEQSPQEPDSSSGIGKTGQQPAKKRLNFGQTGDSESVPDPQPLGEPPATPAAVGPTTMASGGGAPMADNNEGADGVGNASGNWHCDSTWLGDRVITTSTRTWALPTYNNHLYKQISSASTGASNDNHYFGYSTPWGYFDFNRFHCHFSPRDWQRLINNNWGFRPKRLNFKLFNIQVKEVTTNDGVTTIANNLTSTVQVFSDSEYQLPYVLGSAHQGCLPPFPADVFMIPQYGYLTLNNGSQAVGRSSFYCLEYFPSQMLRTGNNFTFSYTFEDVPFHSSYAHSQSLDRLMNPLIDQYLYYLNRTQNQSGSAQNKDLLFSRGSPAGMSVQPKNWLPGPCYRQQRVSKTKTDNNNSNFTWTGASKYNLNGRESIINPGTAMASHKDDEDKFFPMSGVMIFGKESAGASNTALDNVMITDEEEIKATNPVATERFGTVAVNLQSSSTDPATGDVHVMGALPGMVWQDRDVYLQGPIWAKIPHTDGHFHPSPLMGGFGLKHPPPQILIKNTPVPANPPAEFSATKFASFITQYSTGQVSVEIEWELQKENSKRWNPEVQYTSNYAKSANVDFTVDNNGLYTEPRPIGTRYLTRPL

SEQ ID NO: 113 - protein, 736 aa, synthetic construct
  REGION 1..736: note = source = /note="Description of Artificial Sequence: Synthetic polypeptide"
MAADGYLPDWLEDNLSEGIREWWDLKPGAPKPKANQQKQDDGRGLVLPGYKYLGPFNGLDKGEPVNAADAAALEHDKAYDQQLKAGDNPYLRYNHADAEFQERLQEDTSFGGNLGRAVFQAKKRVLEPLGLVEEGAKTAPGKKRPVEQSPQEPDSSSGIGKTGQQPAKKRLNFGQTGDSESVPDPQPLGEPPATPAAVGPTTMASGGGAPMADNNEGADGVGNASGNWHCDSTWLGDRVITTSTRTWALPTYNNHLYKQISSASTGASNDNHYFGYSTPWGYFDFNRFHCHFSPRDWQRLINNNWGFRPKRLNFKLFNIQVKEVTTNDGVTTIANNLTSTVQVFSDSEYQLPYVLGSAHQGCLPPFPADVFMIPQYGYLTLNNGSQAVGRSSFYCLEYFPSQMLRTGNNFTFSYTFEDVPFHSSYAHSQSLDRLMNPLIDQYLYYLNRTQNQSGSAQNKDLLFSRGSPAGMSVQPKNWLPGPCYRQQRVSKTKTDNNNSNFTWTGASKYNLNGRESIINPGTAMASHKDDEDKFFPMSGVMIFGKESAGASNTALDNVMITDEEEIKATNPVATERFGTVAVNLQSSSTDPATGDVHVMGALPGMVWQDRDVYLQGPIWAKIPHTDGHFHPSPLMGGFGLKHPPPQILIKNTPVPANPPAEFSATKFASFITQYSTGQVSVEIEWELQKENSKRWNPEVQYTSNYAKSANVDFTVDNNGLYTEPRPIGTRYLTRPL

SEQ ID NO: 114 - protein, 736 aa, synthetic construct
  REGION 1..736: note = source = /note="Description of Artificial Sequence: Synthetic polypeptide"
MAADGYLPDWLEDNLSEGIREWWDLKPGAPKPKANQQKQDDGRGLVLPGYKYLGPFNGLDKGEPVNAADAAALEHDKAYDQQLKAGDNPYLRYNHADAEFQERLQEDTSFGGNLGRAVFQAKKRVLEPLGLVEEGAKTAPGKKRPVEQSPQEPDSSSGIGKTGQQPAKKRLNFGQTGDSESVPDPQPLGEPPATPAAVGPTTMASGGGAPMADNNEGADGVGNASGNWHCDSTWLGDRVITTSTRTWALPTYNNHLYKQISSASTGASNDNHYFGYSTPWGYFDFNRFHCHFSPRDWQRLINNNWGFRPKRLNFKLFNIQVKEVTTNDGVTTIANNLTSTVQVFSDSEYQLPYVLGSAHQGCLPPFPADVFMIPQYGYLTLNNGSQAVGRSSFYCLEYFPSQMLRTGNNFTFSYTFEDVPFHSSYAHSQSLDRLMNPLIDQYLYYLNRTQNQSGSAQNKDLLFSRGSPAGMSVQPKNWLPGPCYRQQRVSKTKTDNNNSNFTWTGASKYNLNGRESIINPGTAMASHKDDKDKFFPMSGVMIFGKESAGASNTALDNVMITDEEEIKATNPVATERFGTVAVNLQSSSTDPATGDVHVMGALPGMVWQDRDVYLQGPIWAKIPHTDGHFHPSPLMGGFGLKHPPPQILIKNTPVPANPPAEFSATKFASFITQYSTGQVSVEIEWELQKENSKRWNPEVQYTSNYAKSANVDFTVDNNGLYTEPRPIGTRYLTRPL

SEQ ID NO: 115 - DNA, 2214 bp, synthetic construct
  misc_feature 1..2214: note = source = /note="Description of Artificial Sequence: Synthetic polynucleotide"
  source 1..2214: mol_type = other DNA
atggctgccgatggttatcttccagattggctcgaggacaacctctctgagggcattcgcgagtggtgggacctgaaacctggagccccgaaacccaaagccaaccagcaaaagcaggacaacggccggggtctggtgcttcctggctacaagtacctcggacccttcaacggactcgacaagggggagcccgtcaacgcggcggacgcagcggccctcgagcacgacaaggcctacgaccagcagctcaaagcgggtgacaatccgtacctgcggtataaccacgccgacgccgagtttcaggagcgtctgcaagaagatacgtcatttgggggcaacctcgggcgagcagtcttccaggccaagaagcgggttctcgaacctctcggtctggttgaggaaggcgctaagacggctcctgcaaagaagagaccggtagagccgtcacctcagcgttcccccgactcctccacgggcatcggcaagaaaggccagcagcccgccagaaagagactcaatttcggtcagactggcgactcagagtcagtccccgaccctcaacctctcggagaacctccagcagcgccctctagtgtgggatctggtacagtggctgcaggcggtggcgcaccaatggcagacaataacgaaggtgccgacggagtgggtaatgcctcaggaaattggcattgcgattccacatggctgggcgacagagtcattaccaccagcacccgaacctgggccctgcccacctacaacaaccacctctacaagcaaatctccagtgaaactgcaggtagtaccaacgacaacacctacttcggctacagcaccccctgggggtattttgactttaacagattccactgccacttctcaccacgtgactggcagcgactcatcaacaacaactggggattccggcccaagaagctgcggttcaagctcttcaacatccaggtcaaggaggtcacgacgaatgacggcgttacgaccatcgctaataaccttaccagcacgattcaggtattctcggactcggaataccagctgccgtacgtcctcggctctgcgcaccagggctgcctgcctccgttcccggcggacgtcttcatgattcctcagtacggctacctgactctcaacaatggcagtcagtctgtgggacgttcctccttctactgcctggagtacttcccctctcagatgctgagaacgggcaacaactttgagttcagctacagcttcgaggacgtgcctttccacagcagctacgcacacagccagagcctggaccggctgatgaatcccctcatcgaccagtacttgtactacctggccagaacacagagtaacccaggaggcacagctggcaatcgggaactgcagttttaccagggcgggccttcaactatggccgaacaagccaagaattggttacctggaccttgcttccggcaacaaagagtctccaaaacgctggatcaaaacaacaacagcaactttgcttggactggtgccaccaaatatcacctgaacggcagaaactcgttggttaatcccggcgtcgccatggcaactcacaaggacgacgaggaccgctttttcccatccagcggagtcctgatttttggaaaaactggagcaactaacaaaactacattggaaaatgtgttaatgacaaatgaagaagaaattcgtcctactaatcctgtagccacggaagaatacgggatagtcagcagcaacttacaagcggctaatactgcagcccagacacaagttgtcaacaaccagggagccttacctggcatggtctggcagaaccgggacgtgtacctgcagggtcccatctgggccaagattcctcacacggatggcaactttcacccgtctcctttgatgggcggctttggacttaaacatccgcctcctcagatcctgatcaagaacactcccgttcccgctaatcctccggaggtgtttactcctgccaagtttgcttcgttcatcacacagtacagcaccggacaagtcagcgtggaaatcgagtgggagctgcagaaggaaaacagcaagcgctggaacccggagattcagtacacctccaactttgaaaagcagactggtgtggactttgccgttgacagccagggtgtttactctgagcctcgccctattggcactcgttacctcacccgtaatctgtaa

SEQ ID NO: 116 - protein, 738 aa, synthetic construct
  REGION 1..738: note = source = /note="Description of Artificial Sequence: Synthetic polypeptide"
MAADGYLPDWLEDNLSEGIREWWALKPGAPKPKANQQKQDDGRGLVLPGYKYLGPFNGLDKGEPVNAADAAALEHDKAYDQQLQAGDNPYLRYNHADAEFQERLQEDTSFGGNLGRAVFQAKKRVLEPLGLVEEGAKTAPGKKRPVEPSPQRSPDSSTGIGKKGQQPARKRLNFGQTGDSESVPDPQPLGEPPAAPSGVGPNTMAAGGGAPMADNNEGADGVGSSSGNWHCDSTWLGDRVITTSTRTWALPTYNNHLYKQISNGTSGGATNDNTYFGYSTPWGYFDFNRFHCHFSPRDWQRLINNNWGFRPKRLSFKLFNIQVKEVTQNEGTKTIANNLTSTIQVFTDSEYQLPYVLGSAHQGCLPPFPADVFMIPQYGYLTLNNGSQAVGRSSFYCLEYFPSQMLRTGNNFQFTYTFEDVPFHSSYAHSQSLDRLMNPLIDQYLYYLSRTQTTGGTANTQTLGFSQGGPNTMANQAKNWLPGPCYRQQRVSTTTGQNNNSNFAWTAGTKYHLNGRNSLANPGIAMATHKDDEERFFPSNGILIFGKQNAARDNADYSDVMLTSEEEIKTTNPVATEEYGIVADNLQQQNTAPQIGTVNSQGALPGMVWQNRDVYLQGPIWAKIPHTDGNFHPSPLMGGFGLKHPPPQILIKNTPVPADPPTTFNQSKLNSFITQYSTGQVSVEIEWELQKENSKRWNPEIQYTSNYYKSTSVDFAVNTEGVYSEPRPIGTRYLTRNL

SEQ ID NO: 117 - protein, 737 aa, Adeno-associated virus 7
MAADGYLPDWLEDNLSEGIREWWDLKPGAPKPKANQQKQDNGRGLVLPGYKYLGPFNGLDKGEPVNAADAAALEHDKAYDQQLKAGDNPYLRYNHADAEFQERLQEDTSFGGNLGRAVFQAKKRVLEPLGLVEEGAKTAPAKKRPVEPSPQRSPDSSTGIGKKGQQPARKRLNFGQTGDSESVPDPQPLGEPPAAPSSVGSGTVAAGGGAPMADNNEGADGVGNASGNWHCDSTWLGDRVITTSTRTWALPTYNNHLYKQISSETAGSTNDNTYFGYSTPWGYFDFNRFHCHFSPRDWQRLINNNWGFRPKKLRFKLFNIQVKEVTTNDGVTTIANNLTSTIQVFSDSEYQLPYVLGSAHQGCLPPFPADVFMIPQYGYLTLNNGSQSVGRSSFYCLEYFPSQMLRTGNNFEFSYSFEDVPFHSSYAHSQSLDRLMNPLIDQYLYYLARTQSNPGGTAGNRELQFYQGGPSTMAEQAKNWLPGPCFRQQRVSKTLDQNNNSNFAWTGATKYHLNGRNSLVNPGVAMATHKDDEDRFFPSSGVLIFGKTGATNKTTLENVLMTNEEEIRPTNPVATEEYGIVSSNLQAANTAAQTQVVNNQGALPGMVWQNRDVYLQGPIWAKIPHTDGNFHPSPLMGGFGLKHPPPQILIKNTPVPANPPEVFTPAKFASFITQYSTGQVSVEIEWELQKENSKRWNPEIQYTSNFEKQTGVDFAVDSQGVYSEPRPIGTRYLTRNL

SEQ ID NO: 118 - protein, 623 aa, Adeno-associated virus 7
MPGFYEIVIKVPSDLDEHLPGISDSFVNWVAEKEWELPPDSDMDLNLIEQAPLTVAEKLQRDFLVQWRRVSKAPEALFFVQFEKGESYFHLHVLVETTGVKSMVLGRFLSQIREKLVQTIYRGVEPTLPNWFAVTKTRNGAGGGNKVVDECYIPNYLLPKTQPELQWAWTNMEEYISACLNLAERKRLVAQHLTHVSQTQEQNKENLNPNSDAPVIRSKTSARYMELVGWLVDRGITSEKQWIQEDQASYISFNAASNSRSQIKAALDNAGKIMALTKSAPDYLVGPSLPADIKTNRIYRILELNGYDPAYAGSVFLGWAQKKFGKRNTIWLFGPATTGKTNIAEAIAHAVPFYGCVNWTNENFPFNDCVDKMVIWWEEGKMTAKVVESAKAILGGSKVRVDQKCKSSAQIDPTPVIVTSNTNMCAVIDGNSTTFEHQQPLQDRMFKFELTRRLEHDFGKVTKQEVKEFFRWASDHVTEVAHEFYVRKGGASKRPAPDDADISEPKRACPSVADPSTSDAEGAPVDFADRYQNKCSRHAGMIQMLFPCKTCERMNQNFNICFTHGVRDCLECFPGVSESQPVVRKKTYRKLCAIHHLLGRAPEIACSACDLVNVDLDDCVSEQ

SEQ ID NO: 119 - DNA, 4721 bp, Adeno-associated virus 7
  source 1..4721: mol_type = unassigned DNA
ttggccactccctctatgcgcgctcgctcgctcggtggggcctgcggaccaaaggtccgcagacggcagagctctgctctgccggccccaccgagcgagcgagcgcgcatagagggagtggccaactccatcactaggggtaccgcgaagcgcctcccacgctgccgcgtcagcgctgacgtaaatcacgtcataggggagtggtcctgtattagctgtcacgtgagtgcttttgcgacattttgcgacaccacgtggccatttgaggtatatatggccgagtgagcgagcaggatctccattttgaccgcgaaatttgaacgagcagcagccatgccgggtttctacgagatcgtgatcaaggtgccgagcgacctggacgagcacctgccgggcatttctgactcgtttgtgaactgggtggccgagaaggaatgggagctgcccccggattctgacatggatctgaatctgatcgagcaggcacccctgaccgtggccgagaagctgcagcgcgacttcctggtccaatggcgccgcgtgagtaaggccccggaggccctgttctttgttcagttcgagaagggcgagagctacttccaccttcacgttctggtggagaccacgggggtcaagtccatggtgctaggccgcttcctgagtcagattcgggagaagctggtccagaccatctaccgcggggtcgagcccacgctgcccaactggttcgcggtgaccaagacgcgtaatggcgccggcggggggaacaaggtggtggacgagtgctacatccccaactacctcctgcccaagacccagcccgagctgcagtgggcgtggactaacatggaggagtatataagcgcgtgtttgaacctggccgaacgcaaacggctcgtggcgcagcacctgacccacgtcagccagacgcaggagcagaacaaggagaatctgaaccccaattctgacgcgcccgtgatcaggtcaaaaacctccgcgcgctacatggagctggtcgggtggctggtggaccggggcatcacctccgagaagcagtggatccaggaggaccaggcctcgtacatctccttcaacgccgcctccaactcgcggtcccagatcaaggccgcgctggacaatgccggcaagatcatggcgctgaccaaatccgcgcccgactacctggtggggccctcgctgcccgcggacattaaaaccaaccgcatctaccgcatcctggagctgaacgggtacgatcctgcctacgccggctccgtctttctcggctgggcccagaaaaagttcgggaagcgcaacaccatctggctgtttgggcccgccaccaccggcaagaccaacattgcggaagccatcgcccacgccgtgcccttctacggctgcgtcaactggaccaatgagaactttcccttcaacgattgcgtcgacaagatggtgatctggtgggaggagggcaagatgacggccaaggtcgtggagtccgccaaggccattctcggcggcagcaaggtgcgcgtggaccaaaagtgcaagtcgtccgcccagatcgaccccacccccgtgatcgtcacctccaacaccaacatgtgcgccgtgattgacgggaacagcaccaccttcgagcaccagcagccgttgcaggaccggatgttcaaatttgaactcacccgccgtctggagcacgactttggcaaggtgacgaagcaggaagtcaaagagttcttccgctgggccagtgatcacgtgaccgaggtggcgcatgagttctacgtcagaaagggcggagccagcaaaagacccgcccccgatgacgcggatataagcgagcccaagcgggcctgcccctcagtcgcggatccatcgacgtcagacgcggaaggagctccggtggactttgccgacaggtaccaaaacaaatgttctcgtcacgcgggcatgattcagatgctgtttccctgcaaaacgtgcgagagaatgaatcagaatttcaacatttgcttcacacacggggtcagagactgtttagagtgtttccccggcgtgtcagaatctcaaccggtcgtcagaaaaaagacgtatcggaaactctgcgcgattcatcatctgctggggcgggcgcccgagattgcttgctcggcctgcgacctggtcaacgtggacctggacgactgcgtttctgagcaataaatgacttaaaccaggtatggctgccgatggttatcttccagattggctcgaggacaacctctctgagggcattcgcgagtggtgggacctgaaacctggagccccgaaacccaaagccaaccagcaaaagcaggacaacggccggggtctggtgcttcctggctacaagtacctcggacccttcaacggactcgacaagggggagcccgtcaacgcggcggacgcagcggccctcgagcacgacaaggcctacgaccagcagctcaaagcgggtgacaatccgtacctgcggtataaccacgccgacgccgagtttcaggagcgtctgcaagaagatacgtcatttgggggcaacctcgggcgagcagtcttccaggccaagaagcgggttctcgaacctctcggtctggttgaggaaggcgctaagacggctcctgcaaagaagagaccggtagagccgtcacctcagcgttcccccgactcctccacgggcatcggcaagaaaggccagcagcccgccagaaagagactcaatttcggtcagactggcgactcagagtcagtccccgaccctcaacctctcggagaacctccagcagcgccctctagtgtgggatctggtacagtggctgcaggcggtggcgcaccaatggcagacaataacgaaggtgccgacggagtgggtaatgcctcaggaaattggcattgcgattccacatggctgggcgacagagtcattaccaccagcacccgaacctgggccctgcccacctacaacaaccacctctacaagcaaatctccagtgaaactgcaggtagtaccaacgacaacacctacttcggctacagcaccccctgggggtattttgactttaacagattccactgccacttctcaccacgtgactggcagcgactcatcaacaacaactggggattccggcccaagaagctgcggttcaagctcttcaacatccaggtcaaggaggtcacgacgaatgacggcgttacgaccatcgctaataaccttaccagcacgattcaggtattctcggactcggaataccagctgccgtacgtcctcggctctgcgcaccagggctgcctgcctccgttcccggcggacgtcttcatgattcctcagtacggctacctgactctcaacaatggcagtcagtctgtgggacgttcctccttctactgcctggagtacttcccctctcagatgctgagaacgggcaacaactttgagttcagctacagcttcgaggacgtgcctttccacagcagctacgcacacagccagagcctggaccggctgatgaatcccctcatcgaccagtacttgtactacctggccagaacacagagtaacccaggaggcacagctggcaatcgggaactgcagttttaccagggcgggccttcaactatggccgaacaagccaagaattggttacctggaccttgcttccggcaacaaagagtctccaaaacgctggatcaaaacaacaacagcaactttgcttggactggtgccaccaaatatcacctgaacggcagaaactcgttggttaatcccggcgtcgccatggcaactcacaaggacgacgaggaccgctttttcccatccagcggagtcctgatttttggaaaaactggagcaactaacaaaactacattggaaaatgtgttaatgacaaatgaagaagaaattcgtcctactaatcctgtagccacggaagaatacgggatagtcagcagcaacttacaagcggctaatactgcagcccagacacaagttgtcaacaaccagggagccttacctggcatggtctggcagaaccgggacgtgtacctgcagggtcccatctgggccaagattcctcacacggatggcaactttcacccgtctcctttgatgggcggctttggacttaaacatccgcctcctcagatcctgatcaagaacactcccgttcccgctaatcctccggaggtgtttactcctgccaagtttgcttcgttcatcacacagtacagcaccggacaagtcagcgtggaaatcgagtgggagctgcagaaggaaaacagcaagcgctggaacccggagattcagtacacctccaactttgaaaagcagactggtgtggactttgccgttgacagccagggtgtttactctgagcctcgccctattggcactcgttacctcacccgtaatctgtaattgcatgttaatcaataaaccggttgattcgtttcagttgaactttggtctcctgtgcttcttatcttatcggtttccatagcaactggttacacattaactgcttgggtgcgcttcacgataagaacactgacgtcaccgcggtacccctagtgatggagttggccactccctctatgcgcgctcgctcgctcggtggggcctgcggaccaaaggtccgcagacggcagagctctgctctgccggccccaccgagcgagcgagcgcgcatagagggagtggccaa

SEQ ID NO: 120 - DNA, 2214 bp, synthetic construct; identical to SEQ ID NO: 115
  misc_feature 1..2214: note = source = /note="Description of Artificial Sequence: Synthetic polynucleotide"
  source 1..2214: mol_type = other DNA

SEQ ID NO: 121 - protein, 737 aa, synthetic construct; identical to SEQ ID NO: 117
  REGION 1..737: note = source = /note="Description of Artificial Sequence: Synthetic polypeptide"

SEQ ID NO: 122 - DNA, 2217 bp, synthetic construct
  misc_feature 1..2217: note = source = /note="Description of Artificial Sequence: Synthetic polynucleotide"
  source 1..2217: mol_type = other DNA
atggctgccgatggttatcttccagattggctcgaggacaacctctctgagggcattcgcgagtggtgggcgctgaaacctggagccccgaagcccaaagccaaccagcaaaagcaggacgacggccggggtctggtgcttcctggctacaagtacctcggacccttcaacggactcgacaagggggagcccgtcaacgcggcggacgcagcggccctcgagcacgacaaggcctacgaccagcagctgcaggcgggtgacaatccgtacctgcggtataaccacgccgacgccgagtttcaggagcgtctgcaagaagatacgtcttttgggggcaacctcgggcgagcagtcttccaggccaagaagcgggttctcgaacctctcggtctggttgaggaaggcgctaagacggctcctggaaagaagagaccggtagagccatcaccccagcgttctccagactcctctacgggcatcggcaagaaaggccaacagcccgccagaaaaagactcaattttggtcagactggcgactcagagtcagttccagaccctcaacctctcggagaacctccagcagcgccctctggtgtgggacctaatacaatggctgcaggcggtggcgcaccaatggcagacaataacgaaggcgccgacggagtgggtagttcctcgggaaattggcattgcgattccacatggctgggcgacagagtcatcaccaccagcacccgaacctgggccctgcccacctacaacaaccacctctacaagcaaatctccaacgggacatcgggaggagccaccaacgacaacacctacttcggctacagcaccccctgggggtattttgactttaacagattccactgccacttttcaccacgtgactggcagcgactcatcaacaacaactggggattccggcccaagagactcagcttcaagctcttcaacatccaggtcaaggaggtcacgcagaatgaaggcaccaagaccatcgccaataacctcaccagcaccatccaggtgtttacggactcggagtaccagctgccgtacgttctcggctctgcccaccagggctgcctgcctccgttcccggcggacgtgttcatgattccccagtacggctacctaacactcaacaacggtagtcaggccgtgggacgctcctccttctactgcctggaatactttccttcgcagatgctgagaaccggcaacaacttccagtttacttacaccttcgaggacgtgcctttccacagcagctacgcccacagccagagcttggaccggctgatgaatcctctgattgaccagtacctgtactacttgtctcggactcaaacaacaggaggcacggcaaatacgcagactctgggcttcagccaaggtgggcctaatacaatggccaatcaggcaaagaactggctgccaggaccctgttaccgccaacaacgcgtctcaacgacaaccgggcaaaacaacaatagcaactttgcctggactgctgggaccaaataccatctgaatggaagaaattcattggctaatcctggcatcgctatggcaacacacaaagacgacgaggagcgtttttttcccagtaacgggatcctgatttttggcaaacaaaatgctgccagagacaatgcggattacagcgatgtcatgctcaccagcgaggaagaaatcaaaaccactaaccctgtggctacagaggaatacggtatcgtggcagataacttgcagcagcaaaacacggctcctcaaattggaactgtcaacagccagggggccttacccggtatggtctggcagaaccgggacgtgtacctgcagggtcccatctgggccaagattcctcacacggacggcaacttccacccgtctccgctgatgggcggctttggcctgaaacatcctccgcctcagatcctgatcaagaacacgcctgtacctgcggatcctccgaccaccttcaaccagtcaaagctgaactctttcatcacgcaatacagcaccggacaggtcagcgtggaaattgaatgggagctgcagaaggaaaacagcaagcgctggaaccccgagatccagtacacctccaactactacaaatctacaagtgtggactttgctgttaatacagaaggcgtgtactctgaaccccgccccattggcacccgttacctcacccgtaatctgtaa

SEQ ID NO: 123 - DNA, 2213 bp, Adeno-associated virus 8
  source 1..2213: mol_type = unassigned DNA
atggctgccgatggttatcttccagattggctcgaggacaacctctctgagggcattcgcgagtggtgggcgctgaaacctggagccccgaagcccaaagccaaccagcaaaagcaggacgacggccggggtctggtgcttcctggctacaagtacctcggacccttcaacggactcgacaagggggagcccgtcaacgcggcggacgcagcggccctcgagcacgacaaggcctacgaccagcagctgcaggcgggtgacaatccgtacctgcggtataaccacgccgacgccgagtttcaggagcgtctgcaagaagatacgtcttttgggggcaacctcgggcgagcagtcttccaggccaagaagcgggttctcgaacctctcggtctggttgaggaaggcgctaagacggctcctggaaagaagagaccggtagagccatcaccccagcgttctccagactcctctacgggcatcggcaagaaaggccaacagcccgccagaaaaagactcaattttggtcagactggcgactcagagtcagttccagaccctcaacctctcggagaacctccagcagcgccctctggtgtgggacctaatacaatggctgcaggcggtggcgcaccaatggcagacaataacgaaggcgccgacggagtgggtagttcctcgggaaattggcattgcgattccacatggctgggcgacagagtcatcaccaccagcacccgaacctgggccctgcccacctacaacaaccacctctacaagcaaatctccaacgggacatcgggaggagccaccaacgacaacacctacttcggctacagcaccccctgggggtattttgactttaacagattccactgccacttttcaccacgtgactggcagcgactcatcaacaacaactggggattccggcccaagagactcagcttcaagctcttcaacatccaggtcaaggaggtcacgcagaatgaaggcaccaagaccatcgccaataacctcaccagcaccatccaggtgtttacggactcggagtaccagctgccgtacgttctcggctctgcccaccagggctgcctgcctccgttcccggcggacgtgttcatgattccccagtacggctacctaacactcaacaacggtagtcaggccgtgggacgctcctccttctactgcctggaatactttccttcgcagatgctgagaaccggcaacaacttccagtttacttacaccttcgaggacgtgcctttccacagcagctacgcccacagccagagcttggaccggctgatgaatcctctgattgaccagtacctgtactacttgtctcggactcaaacaacaggaggcacggcaaatacgcagactctgggcttcagccaaggtgggcctaatacaatggccaatcaggcaaagaactggctgccaggaccctgttaccgccaacaacgcgtctcaacgacaaccgggcaaaacaacaatagcaactttgcctggactgctgggaccaaataccatctgaatggaagaaattcattggctaatcctggcatcgctatggcaacacacaaagacgacgaggagcgtttttttcccagtaacgggatcctgatttttggcaaacaaaatgctgccagagacaatgcggattacagcgatgtcatgctcaccagcgaggaagaaatcaaaaccactaaccctgtggctacagaggaatacggtatcgtggcagataacttgcagcagcaaaacacggctcctcaaattggaactgtcaacagccagggggccttacccggtatggtctggcagaaccgggacgtgtacctgcagggtcccatctgggccaagattcctcacacggacggcaacttccacccgtctccgctgatgggcggctttggcctgaaacatcctccgcctcagatcctgatcaagaacacgcctgtacctgcggatcctccgaccaccttcaaccagtcaaagctgaactctttcatcacgcaatacagcaccggacaggtcagcgtggaaattgaatgggagctgcagaaggaaaacagcaagcgctggaaccccgagatccagtacacctccaactactacaaatctacaagtgtggactttgctgtaatacagaaggcgtgtactctgaaccccgccccattggcacccgttacctcacccgtaatctg

SEQ ID NO: 124 - DNA, 4393 bp, Adeno-associated virus 8
  source 1..4393: mol_type = unassigned DNA
cagagagggagtggccaactccatcactaggggtagcgcgaagcgcctcccacgctgccgcgtcagcgctgacgtaaattacgtcataggggagtggtcctgtattagctgtcacgtgagtgcttttgcggcattttgcgacaccacgtggccatttgaggtatatatggccgagtgagcgagcaggatctccattttgaccgcgaaatttgaacgagcagcagccatgccgggcttctacgagatcgtgatcaaggtgccgagcgacctggacgagcacctgccgggcatttctgactcgtttgtgaactgggtggccgagaaggaatgggagctgcccccggattctgacatggatcggaatctgatcgagcaggcacccctgaccgtggccgagaagctgcagcgcgacttcctggtccaatggcgccgcgtgagtaaggccccggaggccctcttctttgttcagttcgagaagggcgagagctactttcacctgcacgttctggtcgagaccacgggggtcaagtccatggtgctaggccgcttcctgagtcagattcgggaaaagcttggtccagaccatctacccgcggggtcgagccccaccttgcccaactggttcgcggtgaccaaagacgcggtaatggcgccggcgggggggaacaaggtggtggacgagtgctacatccccaactacctcctgcccaagactcagcccgagctgcagtgggcgtggactaacatggaggagtatataagcgcgtgcttgaacctggccgagcgcaaacggctcgtggcgcagcacctgacccacgtcagccagacgcaggagcagaacaaggagaatctgaaccccaattctgacgcgcccgtgatcaggtcaaaaacctccgcgcgctatatggagctggtcgggtggctggtggaccggggcatcacctccgagaagcagtggatccaggaggaccaggcctcgtacatctccttcaacgccgcctccaactcgcggtcccagatcaaggccgcgctggacaatgccggcaagatcatggcgctgaccaaatccgcgcccgactacctggtggggccctcgctgcccgcggacattacccagaaccgcatctaccgcatcctcgctctcaacggctacgaccctgcctacgccggctccgtctttctcggctgggctcagaaaaagttcgggaaacgcaacaccatctggctgtttggacccgccaccaccggcaagaccaacattgcggaagccatcgcccacgccgtgcccttctacggctgcgtcaactggaccaatgagaactttcccttcaatgattgcgtcgacaagatggtgatctggtgggaggagggcaagatgacggccaaggtcgtggagtccgccaaggccattctcggcggcagcaaggtgcgcgtggaccaaaagtgcaagtcgtccgcccagatcgaccccacccccgtgatcgtcacctccaacaccaacatgtgcgccgtgattgacgggaacagcaccaccttcgagcaccagcagcctctccaggaccggatgtttaagttcgaactcacccgccgtctggagcacgactttggcaaggtgacaaagcaggaagtcaaagagttcttccgctgggccagtgatcacgtgaccgaggtggcgcatgagttttacgtcagaaagggcggagccagcaaaagacccgcccccgatgacgcggataaaagcgagcccaagcgggcctgcccctcagtcgcggatccatcgacgtcagacgcggaaggagctccggtggactttgccgacaggtaccaaaacaaatgttctcgtcacgcgggcatgcttcagatgctgtttccctgcaaaacgtgcgagagaatgaatcagaatttcaacatttgcttcacacacggggtcagagactgctcagagtgtttccccggcgtgtcagaatctcaaccggtcgtcagaaagaggacgtatcggaaactctgtgcgattcatcatctgctggggcgggctcccgagattgcttgctcggcctgcgatctggtcaacgtggacctggatgactgtgtttctgagcaataaatgacttaaaccaggtatggctgccgatggttatcttccagattggctcgaggacaacctctctgagggcattcgcgagtggtgggcgctgaaacctggagccccgaagcccaaagccaaccagcaaaagcaggacgacggccggggtctggtgcttcctggctacaagtacctcggacccttcaacggactcgacaagggggagcccgtcaacgcggcggacgcagcggccctcgagcacgacaaggcctacgaccagcagctgcaggcgggtgacaatccgtacctgcggtataaccacgccgacgccgagtttcaggagcgtctgcaagaagatacgtcttttgggggcaacctcgggcgagcagtcttccaggccaagaagcgggttctcgaacctctcggtctggttgaggaaggcgctaagacggctcctggaaagaagagaccggtagagccatcaccccagcgttctccagactcctctacgggcatcggcaagaaaggccaacagcccgccagaaaaagactcaattttggtcagactggcgactcagagtcagttccagaccctcaacctctcggagaacctccagcagcgccctctggtgtgggacctaatacaatggctgcaggcggtggcgcaccaatggcagacaataacgaaggcgccgacggagtgggtagttcctcgggaaattggcattgcgattccacatggctgggcgacagagtcatcaccaccagcacccgaacctgggccctgcccacctacaacaaccacctctacaagcaaatctccaacgggacatcgggaggagccaccaacgacaacacctacttcggctacagcaccccctgggggtattttgactttaacagattccactgccacttttcaccacgtgactggcagcgactcatcaacaacaactggggattccggcccaagagactcagcttcaagctcttcaacatccaggtcaaggaggtcacgcagaatgaaggcaccaagaccatcgccaataacctcaccagcaccatccaggtgtttacggactcggagtaccagctgccgtacgttctcggctctgcccaccagggctgcctgcctccgttcccggcggacgtgttcatgattccccagtacggctacctaacactcaacaacggtagtcaggccgtgggacgctcctccttctactgcctggaatactttccttcgcagatgctgagaaccggcaacaacttccagtttacttacaccttcgaggacgtgcctttccacagcagctacgcccacagccagagcttggaccggctgatgaatcctctgattgaccagtacctgtactacttgtctcggactcaaacaacaggaggcacggcaaatacgcagactctgggcttcagccaaggtgggcctaatacaatggccaatcaggcaaagaactggctgccaggaccctgttaccgccaacaacgcgtctcaacgacaaccgggcaaaacaacaatagcaactttgcctggactgctgggaccaaataccatctgaatggaagaaattcattggctaatcctggcatcgctatggcaacacacaaagacgacgaggagcgtttttttcccagtaacgggatcctgatttttggcaaacaaaatgctgccagagacaatgcggattacagcgatgtcatgctcaccagcgaggaagaaatcaaaaccactaaccctgtggctacagaggaatacggtatcgtggcagataacttgcagcagcaaaacacggctcctcaaattggaactgtcaacagccagggggccttacccggtatggtctggcagaaccgggacgtgtacctgcagggtcccatctgggccaagattcctcacacggacggcaacttccacccgtctccgctgatgggcggctttggcctgaaacatcctccgcctcagatcctgatcaagaacacgcctgtacctgcggatcctccgaccaccttcaaccagtcaaagctgaactctttcatcacgcaatacagcaccggacaggtcagcgtggaaattgaatgggagctgcagaaggaaaacagcaagcgctggaaccccgagatccagtacacctccaactactacaaatctacaagtgtggactttgctgttaatacagaaggcgtgtactctgaaccccgccccattggcacccgttacctcacccgtaatctgtaattgcctgttaatcaataaaccggttgattcgtttcagttgaactttggtctctgcg

SEQ ID NO: 125 - protein, 738 aa, Adeno-associated virus 8; identical to SEQ ID NO: 116

SEQ ID NO: 126 - protein, 737 aa, Adeno-associated virus 8
MAADGYLPDWLEDNLSEGIREWWALKPGAPKPKANQQKQDDGRGLVLPGYKYLGPFNGLDKGEPVNAADAAALEHDKAYDQQLQAGDNPYLRYNHADAEFQERLQEDTSFGGNLGRAVFQAKKRVLEPLGLVEEGAKTAPGKKRPVEPSPQRSPDSSTGIGKKGQQPARKRLNFGQTGDSESVPDPQPLGEPPAAPSGVGPNTMAAGGGAPMADNNEGADGVGSSSGNWHCDSTWLGDRVITTSTRTWALPTYNNHLYKQISNGTSGGATNDNTYFGYSTPWGYFDFNRFHCHFSPRDWQRLINNNWGFRPKRLSFKLFNIQVKEVTQNEGTKTIANNLTSTIQVFTDSEYQLPYVLGSAHQGCLPPFPADVFMIPQYGYLTLNNGSQAVGRSSFYCLEYFPSQMLRTGNNFQFTYTFEDVPFHSSYAHSQSLDRLMNPLIDQYLYYLSRTQTTGGTANTQTLGFSQGGPNTMANQAKNWLPGPCYRQQRVSTTTGQNNNSNFAWTAGTKYHLNGRNSLANPGIAMATHKDDEERFFPSNGILIFGKQNAARDNADYSDVMLTSEEEIKTTNPVATEEYGIVADNLQQQNTAPQIGTVNSQGALPGMVWQNRDVYLQGPIWAKIPHTDGNFHPSPLMGGFGLKHPPPQILIKNTPVPADPPTTFNQSKLNSFITQYSTGQVSVEIEWELQKENSKRWNPEIQYTSNYYKSTSVDFAVIQKACTLNPAPLAPVTSPVI

SEQ ID NO: 127 - DNA, 2217 bp, synthetic construct; identical to SEQ ID NO: 122
  misc_feature 1..2217: note = source = /note="Description of Artificial Sequence: Synthetic polynucleotide"
  source 1..2217: mol_type = other DNA

SEQ ID NO: 128 - DNA, 2214 bp, synthetic construct
  misc_feature 1..2214: note = source = /note="Description of Artificial Sequence: Synthetic polynucleotide"
  source 1..2214: mol_type = other DNA
atggctgccgatggttatcttccagattggctcgaggacaacctctctgagggcattcgcgagtggtgggcgctgaaacctggagccccgaagcccaaagccaaccagcaaaagcaggacgacggccggggtctggtgcttcctggctacaagtacctcggacccttcaacggactcgacaagggggagcccgtcaacgcggcggacgcagcggccctcgagcacgacaaggcctacgaccagcagctgcaggcgggtgacaatccgtacctgcggtataaccacgccgacgccgagtttcaggagcgtctgcaagaagatacgtcttttgggggcaacctcgggcgagcagtcttccaggccaagaagcgggttctcgaacctctcggtctggttgaggaaggcgctaagacggctcctggaaagaagagaccggtagagccatcaccccagcgttctccagactcctctacgggcatcggcaagaaaggccaacagcccgccagaaaaagactcaattttggtcagactggcgactcagagtcagttccagaccctcaacctctcggagaacctccagcagcgccctctggtgtgggacctaatacaatggctgcaggcggtggcgcaccaatggcagacaataacgaaggcgccgacggagtgggtagttcctcgggaaattggcattgcgattccacatggctgggcgacagagtcatcaccaccagcacccgaacctgggccctgcccacctacaacaaccacctctacaagcaaatctccaacgggacatcgggaggagccaccaacgacaacacctacttcggctacagcaccccctgggggtattttgactttaacagattccactgccacttttcaccacgtgactggcagcgactcatcaacaacaactggggattccggcccaagagactcagcttcaagctcttcaacatccaggtcaaggaggtcacgcagaatgaaggcaccaagaccatcgccaataacctcaccagcaccatccaggtgtttacggactcggagtaccagctgccgtacgttctcggctctgcccaccagggctgcctgcctccgttcccggcggacgtgttcatgattccccagtacggctacctaacactcaacaacggtagtcaggccgtgggacgctcctccttctactgcctggaatactttccttcgcagatgctgagaaccggcaacaacttccagtttacttacaccttcgaggacgtgcctttccacagcagctacgcccacagccagagcttggaccggctgatgaatcctctgattgaccagtacctgtactacttgtctcggactcaaacaacaggaggcacggcaaatacgcagactctgggcttcagccaaggtgggcctaatacaatggccaatcaggcaaagaactggctgccaggaccctgttaccgccaacaacgcgtctcaacgacaaccgggcaaaacaacaatagcaactttgcctggactgctgggaccaaataccatctgaatggaagaaattcattggctaatcctggcatcgctatggcaacacacaaagacgacgaggagcgtttttttcccagtaacgggatcctgatttttggcaaacaaaatgctgccagagacaatgcggattacagcgatgtcatgctcaccagcgaggaagaaatcaaaaccactaaccctgtggctacagaggaatacggtatcgtggcagataacttgcctgagcggacggcgatgagtcttccgggaactgtcaacagccagggggccttacccggtatggtctggcagaaccgggacgtgtacctgcagggtcccatctgggccaagattcctcacacggacggcaacttccacccgtctccgctgatgggcggctttggcctgaaacatcctccgcctcagatcctgatcaagaacacgcctgtacctgcggatcctccgaccaccttcaaccagtcaaagctgaactctttcatcacgcaatacagcaccggacaggtcagcgtggaaattgaatgggagctgcagaaggaaaacagcaagcgctggaaccccgagatccagtacacctccaactactacaaatctacaagtgtggactttgctgttaatacagaaggcgtgtactctgaaccccgccccattggcacccgttacctcacccgtaatctg

SEQ ID NO: 129 - protein, 738 aa, synthetic construct
  REGION 1..738: note = source = /note="Description of Artificial Sequence: Synthetic polypeptide"
MAADGYLPDWLEDNLSEGIREWWALKPGAPKPKANQQKQDDGRGLVLPGYKYLGPFNGLDKGEPVNAADAAALEHDKAYDQQLQAGDNPYLRYNHADAEFQERLQEDTSFGGNLGRAVFQAKKRVLEPLGLVEEGAKTAPGKKRPVEPSPQRSPDSSTGIGKKGQQPARKRLNFGQTGDSESVPDPQPLGEPPAAPSGVGPNTMAAGGGAPMADNNEGADGVGSSSGNWHCDSTWLGDRVITTSTRTWALPTYNNHLYKQISNGTSGGATNDNTYFGYSTPWGYFDFNRFHCHFSPRDWQRLINNNWGFRPKRLSFKLFNIQVKEVTQNEGTKTIANNLTSTIQVFTDSEYQLPYVLGSAHQGCLPPFPADVFMIPQYGYLTLNNGSQAVGRSSFYCLEYFPSQMLRTGNNFQFTYTFEDVPFHSSYAHSQSLDRLMNPLIDQYLYYLSRTQTTGGTANTQTLGFSQGGPNTMANQAKNWLPGPCYRQQRVSTTTGQNNNSNFAWTAGTKYHLNGRNSLANPGIAMATHKDDEERFFPSNGILIFGKQNAARDNADYSDVMLTSEEEIKTTNPVATEEYGIVADNLPERTAMSLPGTVNSQGALPGMVWQNRDVYLQGPIWAKIPHTDGNFHPSPLMGGFGLKHPPPQILIKNTPVPADPPTTFNQSKLNSFITQYSTGQVSVEIEWELQKENSKRWNPEIQYTSNYYKSTSVDFAVNTEGVYSEPRPIGTRYLTRNL

SEQ ID NO: 130 - DNA, 2214 bp, synthetic construct
  misc_feature 1..2214: note = source = /note="Description of Artificial Sequence: Synthetic polynucleotide"
  source 1..2214: mol_type = other DNA
atggctgccgatggttatcttccagattggctcgaggacaacctctctgagggcattcgcgagtggtgggcgctgaaacctggagccccgaagcccaaagccaaccagcaaaagcaggacgacggccggggtctggtgcttcctggctacaagtacctcggacccttcaacggactcgacaagggggagcccgtcaacgcggcggacgcagcggccctcgagcacgacaaggcctacgaccagcagctgcaggcgggtgacaatccgtacctgcggtataaccacgccgacgccgagtttcaggagcgtctgcaagaagatacgtcttttgggggcaacctcgggcgagcagtcttccaggccaagaagcgggttctcgaacctctcggtctggttgaggaaggcgctaagacggctcctggaaagaagagaccggtagagccatcaccccagcgttctccagactcctctacgggcatcggcaagaaaggccaacagcccgccagaaaaagactcaattttggtcagactggcgactcagagtcagttccagaccctcaacctctcggagaacctccagcagcgccctctggtgtgggacctaatacaatggctgcaggcggtggcgcaccaatggcagacaataacgaaggcgccgacggagtgggtagttcctcgggaaattggcattgcgattccacatggctgggcgacagagtcatcaccaccagcacccgaacctgggccctgcccacctacaacaaccacctctacaagcaaatctccaacgggacatcgggaggagccaccaacgacaacacctacttcggctacagcaccccctgggggtattttgactttaacagattccactgccacttttcaccacgtgactggcagcgactcatcaacaacaactggggattccggcccaagagactcagcttcaagctcttcaacatccaggtcaaggaggtcacgcagaatgaaggcaccaagaccatcgccaataacctcaccagcaccatccaggtgtttacggactcggagtaccagctgccgtacgttctcggctctgcccaccagggctgcctgcctccgttcccggcggacgtgttcatgattccccagtacggctacctaacactcaacaacggtagtcaggccgtgggacgctcctccttctactgcctggaatactttccttcgcagatgctgagaaccggcaacaacttccagtttacttacaccttcgaggacgtgcctttccacagcagctacgcccacagccagagcttggaccggctgatgaatcctctgattgaccagtacctgtactacttgtctcggactcaaacaacaggaggcacggcaaatacgcagactctgggcttcagccaaggtgggcctaatacaatggccaatcaggcaaagaactggctgccaggaccctgttaccgccaacaacgcgtctcaacgacaaccgggcaaaacaacaatagcaactttgcctggactgctgggaccaaataccatctgaatggaagaaattcattggctaatcctggcatcgctatggcaacacacaaagacgacgaggagcgtttttttcccagtaacgggatcctgatttttggcaaacaaaatgctgccagagacaatgcggattacagcgatgtcatgctcaccagcgaggaagaaatcaaaaccactaaccctgtggctacagaggaatacggtatcgtggcagataacttgagttttagtcgtgcggttctttgtgatggaactgtcaacagccagggggccttacccggtatggtctggcagaaccgggacgtgtacctgcagggtcccatctgggccaagattcctcacacggacggcaacttccacccgtctccgctgatgggcggctttggcctgaaacatcctccgcctcagatcctgatcaagaacacgcctgtacctgcggatcctccgaccaccttcaaccagtcaaagctgaactctttcatcacgcaatacagcaccggacaggtcagcgtggaaattgaatgggagctgcagaaggaaaacagcaagcgctggaaccccgagatccagtacacctccaactactacaaatctacaagtgtggactttgctgttaatacagaaggcgtgtactctgaaccccgccccattggcacccgttacctcacccgtaatctg

SEQ ID NO: 131 - protein, 738 aa, synthetic construct
  REGION 1..738: note = source = /note="Description of Artificial Sequence: Synthetic polypeptide"
MAADGYLPDWLEDNLSEGIREWWALKPGAPKPKANQQKQDDGRGLVLPGYKYLGPFNGLDKGEPVNAADAAALEHDKAYDQQLQAGDNPYLRYNHADAEFQERLQEDTSFGGNLGRAVFQAKKRVLEPLGLVEEGAKTAPGKKRPVEPSPQRSPDSSTGIGKKGQQPARKRLNFGQTGDSESVPDPQPLGEPPAAPSGVGPNTMAAGGGAPMADNNEGADGVGSSSGNWHCDSTWLGDRVITTSTRTWALPTYNNHLYKQISNGTSGGATNDNTYFGYSTPWGYFDFNRFHCHFSPRDWQRLINNNWGFRPKRLSFKLFNIQVKEVTQNEGTKTIANNLTSTIQVFTDSEYQLPYVLGSAHQGCLPPFPADVFMIPQYGYLTLNNGSQAVGRSSFYCLEYFPSQMLRTGNNFQFTYTFEDVPFHSSYAHSQSLDRLMNPLIDQYLYYLSRTQTTGGTANTQTLGFSQGGPNTMANQAKNWLPGPCYRQQRVSTTTGQNNNSNFAWTAGTKYHLNGRNSLANPGIAMATHKDDEERFFPSNGILIFGKQNAARDNADYSDVMLTSEEEIKTTNPVATEEYGIVADNLSFSRAVLCDGTVNSQGALPGMVWQNRDVYLQGPIWAKIPHTDGNFHPSPLMGGFGLKHPPPQILIKNTPVPADPPTTFNQSKLNSFITQYSTGQVSVEIEWELQKENSKRWNPEIQYTSNYYKSTSVDFAVNTEGVYSEPRPIGTRYLTRNL

SEQ ID NO: 132 - DNA, 4385 bp, Adeno-associated virus 9
  source 1..4385: mol_type = unassigned DNA
cagagagggagtggccaactccatcactaggggtaatcgcgaagcgcctcccacgctgccgcgtcagcgctgacgtagattacgtcataggggagtggtcctgtattagctgtcacgtgagtgcttttgcgacattttgcgacaccacatggccatttgaggtatatatggccgagtgagcgagcaggatctccattttgaccgcgaaatttgaacgagcagcagccatgccgggcttctacgagattgtgatcaaggtgccgagcgacctggacgagcacctgccgggcatttctgactcttttgtgaactgggtggccgagaaggaatgggagctgcccccggattctgacatggatcggaatctgatcgagcaggcacccctgaccgtggccgagaagctgcagcgcgacttcctggtccaatggcgccgcgtgagtaaggccccggaggccctcttctttgttcagttcgagaagggcgagagctactttcacctgcacgttctggtcgagaccacgggggtcaagtccatggtgctaggccgcttcctgagtcagattcgggagaagctggtccagaccatctaccgcgggatcgagccgaccctgcccaactggttcgcggtgaccaagacgcgtaatggcgccggcggggggaacaaggtggtggacgagtgctacatccccaactacctcctgcccaagactcagcccgagctgcagtgggcgtggactaacatggaggagtatataagcgcgtgcttgaacctggccgagcgcaaacggctcgtggcgcagcacctgacccacgtcagccagacgcaggagcagaacaaggagaatctgaaccccaattctgacgcgcccgtgatcaggtcaaaaacctccgcgcgctacatggagctggtcgggtggctggtggaccggggcatcacctccgagaagcagtggatccaggaggaccaggcctcgtacatctccttcaacgccgcctccaactcgcggtcccagatcaaggccgcgctggacaatgccggcaagatcatggcgctgaccaaatccgcgcccgactacctggtaggcccttcacttccggtggacattacgcagaaccgcatctaccgcatcctgcagctcaacggctacgaccctgcctacgccggctccgtctttctcggctgggcacaaaagaagttcgggaaacgcaacaccatctggctgtttgggccggccaccacgggaaagaccaacatcgcagaagccattgcccacgccgtgcccttctacggctgcgtcaactggaccaatgagaactttcccttcaacgattgcgtcgacaagatggtgatctggtgggaggagggcaagatgacggccaaggtcgtggagtccgccaaggccattctcggcggcagcaaggtgcgcgtggaccaaaagtgcaagtcgtccgcccagatcgaccccactcccgtgatcgtcacctccaacaccaacatgtgcgccgtgattgacgggaacagcaccaccttcgagcaccagcagcctctccaggaccggatgtttaagttcgaactcacccgccgtctggagcacgactttggcaaggtgacaaagcaggaagtcaaagagttcttccgctgggccagtgatcacgtgaccgaggtggcgcatgagttttacgtcagaaagggcggagccagcaaaagacccgcccccgatgacgcggataaaagcgagcccaagcgggcctgcccctcagtcgcggatccatcgacgtcagacgcggaaggagctccggtggactttgccgacaggtaccaaaacaaatgttctcgtcacgcgggcatgcttcagatgctgcttccctgcaaaacgtgcgagagaatgaatcagaatttcaacatttgcttcacacacggggtcagagactgctcagagtgtttccccggcgtgtcagaatctcaaccggtcgtcagaaagaggacgtatcggaaactctgtgcgattcatcatctgctggggcgggctcccgagattgcttgctcggcctgcgatctggtcaacgtggacctggatgactgtgtttctgagcaataaatgacttaaaccaggtatggctgccgatggttatcttccagattggctcgaggacaacctctctgagggcattcgcgagtggtgggcgctgaaacctggagccccgaagcccaaagccaaccagcaaaagcaggacgacggccggggtctggtgcttcctggctacaagtacctcggacccttcaacggactcgacaagggggagcccgtcaacgcggcggacgcagcggccctcgagcacggcaaggcctacgaccagcagctgcaggcgggtgacaatccgtacctgcggtataaccacgccgacgccgagtttcaggagcgtctgcaagaagatacgtcttttgggggcaacctcgggcgagcagtcttccaggccaagaagcgggttctcgaacctctcggtctggttgaggaaggcgctaagacggctcctggaaagaagagaccggtagagccatcaccccagcgttctccagactcctctacgggcatcggcaagaaaggccaacagcccgccagaaaaagactcaattttggtcagactggcgactcagagtcagttccagaccctcaacctctcggagaacctccagcagcgccctctggtgtgggacctaatacaatggctgcaggcggtggcgcaccaatggcagacaataacgaaggcgccgacggagtgggtaattcctcgggaaattggcattgcgattccacatggctgggggacagagtcatcaccaccagcacccgaacctgggcattgcccacctacaacaaccacctctacaagcaaatctccaatggaacatcgggaggaagcaccaacgacaacacctactttggctacagcaccccctgggggtattttgacttcaacagattccactgccacttctcaccacgtgactggcagcgactcatcaacaacaactggggattccggccaaagagactcaacttcaagctgttcaacatccaggtcaaggaggttacgacgaacgaaggcaccaagaccatcgccaataaccttaccagcaccgtccaggtctttacggactcggagtaccagctaccgtacgtcctaggctctgcccaccaaggatgcctgccaccgtttcctgcagacgtcttcatggttcctcagtacggctacctgacgctcaacaatggaagtcaagcgttaggacgttcttctttctactgtctggaatacttcccttctcagatgctgagaaccggcaacaactttcagttcagctacactttcgaggacgtgcctttccacagcagctacgcacacagccagagtctagatcgactgatgaaccccctcatcgaccagtacctatactacctggtcagaacacagacaactggaactgggggaactcaaactttggcattcagccaagcaggccctagctcaatggccaatcaggctagaaactgggtacccgggccttgctaccgtcagcagcgcgtctccacaaccaccaaccaaaataacaacagcaactttgcgtggacgggagctgctaaattcaagctgaacgggagagactcgctaatgaatcctggcgtggctatggcatcgcacaaagacgacgaggaccgcttctttccatcaagtggcgttctcatatttggcaagcaaggagccgggaacgatggagtcgactacagccaggtgctgattacagatgaggaagaaattaaagccaccaaccctgtagccacagaggaatacggagcagtggccatcaacaaccaggccgctaacacgcaggcgcaaactggacttgtgcataaccagggagttattcctggtatggtctggcagaaccgggacgtgtacctgcagggccctatttgggctaaaatacctcacacagatggcaactttcacccgtctcctctgatgggtggatttggactgaaacacccacctccacagattctaattaaaaatacaccagtgccggcagatcctcctcttaccttcaatcaagccaagctgaactctttcatcacgcagtacagcacgggacaagtcagcgtggaaatcgagtgggagctgcagaaagaaaacagcaagcgctggaatccagagatccagtatacttcaaactactacaaatctacaaatgtggactttgctgtcaataccaaaggtgtttactctgagcctcgccccattggtactcgttacctcacccgtaatttgtaattgcctgttaatcaataaaccggttaattcgtttcagttgaactttggtctctgcg

SEQ ID NO: 133 - DNA, 4382 bp, Adeno-associated virus 9
  source 1..4382: mol_type = unassigned DNA
cagagagggagtggccaactccatcactaggggtaatcgcgaagcgcctcccacgctgccgcgtcagcgctgacgtagattacgtcataggggagtggtcctgtattagctgtcacgtgagtgcttttgcgacattttgcgacaccacatggccatttgaggtatatatggccgagtgagcgagcaggatctccattttgaccgcgaaatttgaacgagcagcagccatgccgggcttctacgagattgtgatcaaggtgccgagcgacctggacgagcacctgccgggcatttctgactcttttgtgaactgggtggccgagaaggaatgggagctgcccccggattctgacatggatcggaatctgatcgagcaggcacccctgaccgtggccgagaagctgtagcgcgacttcctggtccaatggcgccgcgtgagtaaggccccggaggccctcttctttgttcagttcgagaagggcgagagctactttcacctgcacgttctggtcgagaccacgggggtcaagtccatggtgctaggccgcttcctgagtcagattcgggagaagctggtccagaccatctaccgcgggatcgagccgaccctgcccaactggttcgcggtgaccaagacgcgtaatggcgccggcggggggaacaaggtggtggacgagtgctacatccccaactacctcctgcccaagactcagcccgagctgcagtgggcgtggactaacatggaggagtatataagcgcgtgcttgaacctggccgagcgcaaacggctcgtggcgcagcacctgacccacgtcagccagacgcaggagcagaacaaggagaatctgaaccccaattctgacgcgcccgtgatcaggtcaaaaacctccgcgcgctacatggagctggtcgggtggctggtggaccggggcatcacctccgagaagcagtggatccaggaggaccaggcctcgtacatctccttcaacgccgcctccaactcgcggtcccagatcaaggccgcgctggacaatgccggcaagatcatggcgctgaccaaatccgcgcccgactacctggtaggcccttcacttccggtggacattacgcagaaccgcatctaccgcatcctgcagctcaacggctacgaccctgcctacgccggctccgtctttctcggctgggcacaaaagaagttcgggaaacgcaacaccatctggctgtttgggccggccaccacgggaaagaccaacatcgcagaagccattgcccacgccgtgcccttctacggctgcgtcaactggaccaatgagaactttcccttcaacgattgcgtcgacaagatggtgatctggtgggaggagggcaagatgacggccaaggtcgtggagtccgccaaggccattctcggcggcagcaaggtgcgcgtggaccaaaagtgcaagtcgtccgcccagatcgaccccactcccgtgatcgtcacctccaacaccaacatgtgcgccgtgattgacgggaacagcaccaccttcgagcaccagcagcctctccaggaccggatgtttaagttcgaactcacccgccgtctggagcacgactttggcaaggtgacaaagcaggaagtcaaagagttcttccgctgggccagtgatcacgtgaccgaggtggcgcatgagttttacgtcagaaagggcggagccagcaaaagacccgcccccgatgacgcggataaaagcgagcccaagcgggcctgcccctcagtcgcggatccatcgacgtcagacgcggaaggagctccggtggactttgccgacaggtaccaaaacaaatgttctcgtcacgcgggcatgcttcagatgctgcttccctgcaaaacgtgcgagagaatgaatcagaatttcaacatttgcttcacacacggggtcagagactgctcagagtgtttccccggcgtgtcagaatctcaaccggtcgtcagaaagaggacgtatcggaaactctgtgcgattcatcatctgctggggcgggctcccgagattgcttgctcggcctgcgatctggtcaacgtggacctggatgactgtgtttctgagcaataaatgacttaaaccaggtatggctgccgatggttatcttccagattggctcgaggacaacctctctgagggcattcgcgagtggtgggacctgaaacctggagccccgaaacccaaagccaaccagcaaaagcaggacgacggccggggtctggtgcttcctggctacaagtacctcggacccttcaacggactcgacaagggggagcccgtcaacgcggcggacgcagcggccctcgagcacgacaaggcctacgaccagcagctcaaagcgggtgacaatccgtacctgcggtataaccacgccgacgccgagtttcaggagcgtctgcaagaagatacgtcttttgggggcaacctcgggcgagcagtcttccaggccaagaagcgggttctcgaacctctcggtctggttgaggaaggcgctaagacggctcctggaaagaagagaccggtagagcagtcaccccaagaaccagactcatcctcgggcatcggcaaatcaggccagcagcccgctaaaaagagactcaattttggtcagactggcgactcagagtcagtccccgacccacaacctctcggagaacctccagaagccccctcaggtctgggacctaatacaatggcttcaggcggtggcgctccaatggcagacaataacgaaggcgccgacggagtgggtaattcctcgggaaattggcattgcgattccacatggctgggggacagagtcatcaccaccagcacccgaacctgggcattgcccacctacaacaaccacctctacaagcaaatctccaatggaacatcgggaggaagcaccaacgacaacacctactttggctacagcaccccctgggggtattttgacttcaacagattccactgccacttctcaccacgtgactggcagcgactcatcaacaacaactggggattccggccaaagagactcaacttcaagctgttcaacatccaggtcaaggaggttacgacgaacgaaggcaccaagaccatcgccaataaccttaccagcaccgtccaggtctttacggactcggagtaccagctaccgtacgtcctaggctctgcccaccaaggatgcctgccaccgtttcctgcagacgtcttcatggttcctcagtacggctacctgacgctcaacaatggaagtcaagcgttaggacgttcttctttctactgtctggaatacttcccttctcagatgctgagaaccggcaacaactttcagttcagctacactttcgaggacgtgcctttccacagcagctacgcacacagccagagtctagatcgactgatgaaccccctcatcgaccagtacctatactacctggtcagaacacagacaactggaactgggggaactcaaactttggcattcagccaagcaggccctagctcaatggccaatcaggctagaaactgggtacccgggccttgctaccgtcagcagcgcgtctccacaaccaccaaccaaaataacaacagcaactttgcgtggacgggagctgctaaattcaagctgaacgggagagactcgctaatgaatcctggcgtggctatggcatcgcacaaagacgacgaggaccgcttctttccatcaagtggcgttctcatatttggcaagcaaggagccgggaacgatggagtcgactacagccaggtgctgattacagatgaggaagaaattaaagccaccaaccctgtagccacagaggaatacggagcagtggccatcaacaaccaggccgctaacacgcaggcgcaaactggacttgtgcataaccagggagttattcctggtatggtctggcagaaccgggacgtgtacctgcagggccctatttgggctaaaatacctcacacagatggcaactttcacccgtctcctctgatgggtggatttggactgaaacacccacctccacagattctaattaaaaatacaccagtgccggcagatcctcctcttaccttcaatcaagccaagctgaactctttcatcacgcagtacagcacgggacaagtcagcgtggaaatcgagtgggagctgcagaaagaaaacagcaagcgctggaatccagagatccagtatacttcaaactactacaaatctacaaatgtggactttgctgtcaataccgaaggtgtttactctgagcctcgccccattggtactcgttacctcacccgtaatttgtaattgcctgttaatcaataaaccggttaattcgtttcagttgaactttggtctctgcg

SEQ ID NO: 134 - protein, 736 aa, Adeno-associated virus 9
MAADGYLPDWLEDNLSEGIREWWALKPGAPQPKANQQHQDNARGLVLPGYKYLGPGNGLDKGEPVNAADAAALEHDKAYDQQLKAGDNPYLKYNHADAEFQERLKEDTSFGGNLGRAVFQAKKRLLEPLGLVEEAAKTAPGKKRPVEQSPQEPDSSAGIGKSGAQPAKKRLNFGQTGDTESVPDPQPIGEPPAAPSGVGSLTMASGGGAPVADNNEGADGVGSSSGNWHCDSQWLGDRVITTSTRTWALPTYNNHLYKQISNSTSGGSSNDNAYFGYSTPWGYFDFNRFHCHFSPRDWQRLINNNWGFRPKRLNFKLFNIQVKEVTDNNGVKTIANNLTSTVQVFTDSDYQLPYVLGSAHEGCLPPFPADVFMIPQYGYLTLNDGSQAVGRSSFYCLEYFPSQMLRTGNNFQFSYEFENVPFHSSYAHSQSLDRLMNPLIDQYLYYLSKTINGSGQNQQTLKFSVAGPSNMAVQGRNYIPGPSYRQQRVSTTVTQNNNSEFAWPGASSWALNGRNSLMNPGPAMASHKEGEDRFFPLSGSLIFGKQGTGRDNVDADKVMITNEEEIKTTNPVATESYGQVATNHQSAQAQAQTGWVQNQGILPGMVWQDRDVYLQGPIWAKIPHTDGNFHPSPLMGGFGMKHPPPQILIKNTPVPADPPTAFNKDKLNSFITQYSTGQVSVEIEWELQKENSKRWNPEIQYTSNYYKSNNVEFAVNTEGVYSEPRPIGTRYLTRNL

SEQ ID NO: 135 - protein, 736 aa, Adeno-associated virus 9
MAADGYLPDWLEDNLSEGIREWWDLKPGAPKPKANQQKQDDGRGLVLPGYKYLGPFNGLDKGEPVNAADAAALEHDKAYDQQLKAGDNPYLRYNHADAEFQERLQEDTSFGGNLGRAVFQAKKRVLEPLGLVEEGAKTAPGKKRPVEQSPQEPDSSSGIGKSGQQPAKKRLNFGQTGDSESVPDPQPLGEPPEAPSGLGPNTMASGGGAPMADNNEGADGVGNSSGNWHCDSTWLGDRVITTSTRTWALPTYNNHLYKQISNGTSGGSTNDNTYFGYSTPWGYFDFNRFHCHFSPRDWQRLINNNWGFRPKRLNFKLFNIQVKEVTTNEGTKTIANNLTSTVQVFTDSEYQLPYVLGSAHQGCLPPFPADVFMVPQYGYLTLNNGSQALGRSSFYCLEYFPSQMLRTGNNFQFSYTFEDVPFHSSYAHSQSLDRLMNPLIDQYLYYLVRTQTTGTGGTQTLAFSQAGPSSMANQARNWVPGPCYRQQRVSTTTNQNNNSNFAWTGAAKFKLNGRDSLMNPGVAMASHKDDEDRFFPSSGVLIFGKQGAGNDGVDYSQVLITDEEEIKATNPVATEEYGAVAINNQAANTQAQTGLVHNQGVIPGMVWQNRDVYLQGPIWAKIPHTDGNFHPSPLMGGFGLKHPPPQILIKNTPVPADPPLTFNQAKLNSFITQYSTGQVSVEIEWELQKENSKRWNPEIQYTSNYYKSTNVDFAVNTEGVYSEPRPIGTRYLTRNL

SEQ ID NO: 136 - protein, 623 aa, Adeno-associated virus 9
MPGFYEIVIKVPSDLDEHLPGISDSFVNWVAEKEWELPPDSDMDRNLIEQAPLTVAEKLQRDFLVQWRRVSKAPEALFFVQFEKGESYFHLHVLVETTGVKSMVLGRFLSQIREKLVQTIYRGIEPTLPNWFAVTKTRNGAGGGNKVVDECYIPNYLLPKTQPELQWAWTNMEEYISACLNLAERKRLVAQHLTHVSQTQEQNKENLNPNSDAPVIRSKTSARYMELVGWLVDRGITSEKQWIQEDQASYISFNAASNSRSQIKAALDNAGKIMALTKSAPDYLVGPSLPVDITQNRIYRILQLNGYDPAYAGSVFLGWAQKKFGKRNTIWLFGPATTGKTNIAEAIAHAVPFYGCVNWTNENFPFNDCVDKMVIWWEEGKMTAKVVESAKAILGGSKVRVDQKCKSSAQIDPTPVIVTSNTNMCAVIDGNSTTFEHQQPLQDRMFKFELTRRLEHDFGKVTKQEVKEFFRWASDHVTEVAHEFYVRKGGASKRPAPDDADKSEPKRACPSVADPSTSDAEGAPVDFADRYQNKCSRHAGMLQMLLPCKTCERMNQNFNICFTHGVRDCSECFPGVSESQPVVRKRTYRKLCAIHHLLGRAPEIACSACDLVNVDLDDCVSEQ

SEQ ID NO: 137 - DNA, 2211 bp, synthetic construct
  misc_feature 1..2211: note = source = /note="Description of Artificial Sequence: Synthetic polynucleotide"
  source 1..2211: mol_type = other DNA
atggctgccgatggttatcttccagattggctcgaggacaaccttagtgaaggaattcgcgagtggtgggctttgaaacctggagcccctcaacccaaggcaaatcaacaacatcaagacaacgctcgaggtcttgtgcttccgggttacaaataccttggacccggcaacggactcgacaagggggagccggtcaacgcagcagacgcggcggccctcgagcacgacaaggcctacgaccagcagctcaaggccggagacaacccgtacctcaagtacaaccacgccgacgccgagttccaggagcggctcaaagaagatacgtcttttgggggcaacctcgggcgagcagtcttccaggccaaaaagaggcttcttgaacctcttggtctggttgaggaagcggctaagacggctcctggaaagaagaggcctgtagagcagtctcctcaggaaccggactcctccgcgggtattggcaaatcgggtgcacagcccgctaaaaagagactcaatttcggtcagactggcgacacagagtcagtcccagaccctcaaccaatcggagaacctcccgcagccccctcaggtgtgggatctcttacaatggcttcaggtggtggcgcaccagtggcagacaataacgaaggtgccgatggagtgggtagttcctcgggaaattggcattgcgattcccaatggctgggggacagagtcatcaccaccagcacccgaacctgggccctgcccacctacaacaatcacctctacaagcaaatctccaacagcacatctggaggatcttcaaatgacaacgcctacttcggctacagcaccccctgggggtattttgacttcaacagattccactgccacttctcaccacgtgactggcagcgactcatcaacaacaactggggattccggcctaagcgactcaacttcaagctcttcaacattcaggtcaaagaggttacggacaacaatggagtcaagaccatcgccaataaccttaccagcacggtccaggtcttcacggactcagactatcagctcccgtacgtgctcgggtcggctcacgagggctgcctcccgccgttcccagcggacgttttcatgattcctcagtacgggtatctgacgcttaatgatggaagccaggccgtgggtcgttcgtccttttactgcctggaatatttcccgtcgcaaatgctaagaacgggtaacaacttccagttcagctacgagtttgagaacgtacctttccatagcagctacgctcacagccaaagcctggaccgactaatgaatccactcatcgaccaatacttgtactatctctcaaagactattaacggttctggacagaatcaacaaacgctaaaattcagtgtggccggacccagcaacatggctgtccagggaagaaactacatacctggacccagctaccgacaacaacgtgtctcaaccactgtgactcaaaacaacaacagcgaatttgcttggcctggagcttcttcttgggctctcaatggacgtaatagcttgatgaatcctggacctgctatggccagccacaaagaaggagaggaccgtttctttcctttgtctggatctttaatttttggcaaacaaggaactggaagagacaacgtggatgcggacaaagtcatgataaccaacgaagaagaaattaaaactactaacccggtagcaacggagtcctatggacaagtggccacaaaccaccagagtgcccaagcacaggcgcagaccggctgggttcaaaaccaaggaatacttccgggtatggtttggcaggacagagatgtgtacctgcaaggacccatttgggccaaaattcctcacacggacggcaactttcacccttctccgctgatgggagggtttggaatgaagcacccgcctcctcagatcctcatcaaaaacacacctgtacctgcggatcctccaacggccttcaacaaggacaagctgaactctttcatcacccagtattctactggccaagtcagcgtggagatcgagtgggagctgcagaaggaaaacagcaagcgctggaacccggagatccagtacacttccaactattacaagtctaataatgttgaatttgctgttaatactgaaggtgtatatagtgaaccccgccccattggcaccagatacctgactcgtaatctgtaa

SEQ ID NO: 138 - protein, 736 aa, synthetic construct; identical to SEQ ID NO: 134
  REGION 1..736: note = source = /note="Description of Artificial Sequence: Synthetic polypeptide"

SEQ ID NO: 139 - DNA, 2460 bp, synthetic construct
  misc_feature 1..2460: note = source = /note="Description of Artificial Sequence: Synthetic polynucleotide"
  source 1..2460: mol_type = other DNA
ggtaattcctccggaaattggcattgcgattccacatggctgggcgaccgagtcattaccaccagcacccggacttgggccctgcccacctacaacaaccacctctacaagcaaatctccagccaatcgggtgccaccaacgacaaccactacttcggctacagcaccccttgggggtattttgatttcaacagattccactgccatttctcaccacgtgactggcagcgactcatcaacaacaactggggattcatggctgccgatggttatcttccagattggctcgaggacactctctctgaaggaatcagacagtggtggaagctcaaacctggcccaccaccgccgaaacctaaccaacaacaccgggacgacagtaggggtcttgtgcttcctgggtacaagtacctcggacccttcaacggactcgacaaaggagagccggtcaacgaggcagacgccgcggccctcgagcacgacaaagcctacgaccaccagctcaagcaaggggacaacccgtacctcaaatacaaccacgcggacgctgaatttcaggagcgtcttcaagaagatacgtctttcgggggcaacctcgggcgagcagtcttccaggccaaaaagagggtactcgagcctcttggtctggttgaggaagctgttaagacggctcctggaaaaaagagacctatagagcagtctcctgcagaaccggactcttcctcgggcatcggcaaatcaggccagcagcccgctaagaaaagactcaattttggtcagactggcgacacagagtcagtcccagaccctcaaccaatcggagaaccccccgcagccccctctggtgtgggatctaatacaatggcttcaggcggtggggcaccaatggcagacaataacgaaggcgccgacggagtgggtaattcctcgggaaattggcattgcgattccacatggatgggcgacagagttatcaccaccagcacaagaacctgggccctccccacctacaataatcacctctacaagcaaatctccagcgaatcgggagccaccaacgacaaccactacttcggctacagcaccccctgggggtattttgactttaacagattccactgtcacttctcaccacgtgactggcagcgactcatcaacaacaactggggatttagacccaagaaactcaatttcaagctcttcaacatccaagtcaaggaggtcacgcagaatgatggaaccacgaccatcgccaataaccttaccagcacggtgcaggtcttcacagactctgagtaccagctgccctacgtcctcggttcggctcaccagggctgccttccgccgttcccagcagacgtcttcatgattcctcagtacggctacttgactctgaacaatggcagccaagcggtaggacgttcttcattctactgtctagagtattttccctctcagatgctgaggacgggaaacaacttcaccttcagctacacttttgaagacgtgcctttccacagcagctacgcgcacagccagagtctggatcggctgatgaatcctctcattgaccagtacctgtattacctgagcaaaactcagggtacaagtggaacaacgcagcaatcgagactgcagttcagccaagctgggcctagctccatggctcagcaggccaaaaactggctaccgggacccagctaccgacagcagcgaatgtctaagacggctaatgacaacaacaacagtgaatttgcttggactgcagccaccaaatattacctgaatggaagaaattctctggtcaatcccgggcccccaatggccagtcacaaggacgatgaggaaaagtatttccccatgcacggaaatctcatctttggaaaacaaggcacaggaactaccaatgtggacattgaatcagtgcttattacagacgaagaagaaatcagaacaactaatcctgtggctacagaacaatacggacaggttgccaccaaccatcagagtcagaacaccacagcttcctatggaagtgtggacagccagggaatcttacctggaatggtgtggcaggaccgcgatgtctatcttcaaggtcccatttgggccaaaactcctcacacggacggacactttcatccttctccgctcatgggaggctttggactgaaacaccctcctccccagatcctgatcaaaaacacacctgtgccagcgaatcccgcgaccactttcactcctggaaagtttgcttcgttcattacccagtattccaccggacaggtcagcgtggaaatagagtgggagctgcagaaagaaaacagcaaacgctggaacccagaaattcagtacacctccaactacaacaagtcggtgaatgtggagtttaccgtggacgcaaacggtgtttattctgaaccccgccctattggcactcgttaccttacccggaacttg

SEQ ID NO: 140 - DNA, 3123 bp, synthetic construct
  misc_feature 1..3123: note = source = /note="Description of Artificial Sequence: Synthetic polynucleotide"
  source 1..3123: mol_type = other DNA
gaattcgccctttctacggctgcgtcaactggaccaatgaaaactttcccttcaacgattgcgtcgacaagatggtgatctggtgggaggagggaaagatgaccgccaaggtcgtggaatctgccaaagccattctgggtggaggcaaggttcgtgtggaccagaaatgcaagtcttcggcccagatcgacccgactccggtgattgtcacctctaacaccaacatgtgcgccgtgattgacggaaactcgaccaccttcgagcaccagcagccgttgcaagaccggatgttcaaatttgaacttacccgccgtttggatcatgactttgggaaggtcaccaagcaggaagtcaaagactttttccggtgggctcaagatcacgtgactgaggtggagcatgagttctacgtcaaaaagggtggagccaagaaaaggcccgcccccgatgatgtatatataaatgagcccaagcgggcgcgcgagtcagttgcgcagccatcgacgtcagacgcggaagcttcgataaactacgcggacaggtaccaaaacaaatgttctcgtcacgtgggcatgaatctgatgctgtttccctgtcgacaatgcgaaagaatgaatcagaattcaaatatctgcttcacacacgggcaaaaagactgtttggaatgctttcccgtgtcagaatctcaacccgtttctgtcgtcagaaaaacgtatcagaaactttgttacattcatcatatcatgggaaaagtaccagacgcctgcactgcctgcgacctggtaaatgtggacttggatgactgtatttctgagcaataaatgacttaaatcaggtatggctgctgacggttatcttccagattggctcgaggacactctctctgaaggaatcagacagtggtggaagctcaaacctggcccaccaccgccgaaacctaaccaacaacaccgggacgacagtaggggtcttgtgcttcctgggtacaagtacctcggacccttcaacggactcgacaaaggagagccggtcaacgaggcagacgccgcggccctcgagcacgacaaagcctacgaccaccagctcaagcaaggggacaacccgtacctcaaatacaaccacgcggacgctgaatttcaggagcgtcttcaagaagatacgtctttcgggggcaacctcgggcgagcagtcttccaggccaaaaagagggtactcgagcctcttggtctggttgaggaagctgttaagacggctcctggaaaaaagagacctatagagcagtctcctgcagaaccggactcttcctcgggcatcggcaaatcaggccagcagcccgctaagaaaagactcaattttggtcagactggcgacacagagtcagtcccaggccctcaaccaatcggagaaccccccgcagccccctctggtgtgggatctaatacaatggcttcaggcggtggggcaccaatggcagacaataacgaaggcgccgacggagtgggtaattcctcgggaaattggcattgcgattccacatggatgggcgacagagttatcaccaccagcacaagaacctgggccctccccacctacaataatcacctctacaagcaaatctccagcgaatcgggagccaccaacgacaaccactacttcggctacagcaccccctgggggtattttgactttaacagattccactgtcacttctcaccacgtgactggcagcgactcatcaacaacaactggggatttagacccaagaaactcaatttcaagctcttcaacatccaagtcaaggaggtcacgcagaatgatggaaccacgaccatcgccaataaccttaccagcgcggtgcaggtcttcacagactctgagtaccagctgccctacgtcctcggttcggctcaccagggctgccttccgccgttcccagcagacgtcttcatgattcctcagtacggctacttgactctgaacaatggcagccaagcggtaggacgttcttcattctactgtctagagtattttccctctcagatgctgaggacgggaaacaacttcaccttcagctacacttttgaagacgtgcctttccacagcagctacgcgcacagccagagtctggatcggctgatgaatcctctcattgaccagtacctgtattacctgagcaaaactcagggtacaagtggaacaacgcagcaatcgagactgcagttcagccaagctgggcctagctccatggctcagcaggccaaaaactggctaccgggacccagctaccgacagcagcgaatgtctaagacggctaatgacaacaacaacagtgaatttgcttggactgcagccaccaaatattacctgaatggaagaaattctctggtcaatcccgggcccccagtggccagtcacaaggacgatgaggaaaagtatttccccatgcacggaaatctcatctttggaaaacaaggcacaggaactaccaatgtggacattgaatcagtgcttattacagacgaagaagaaatcagaacaactaatcctgtggctacagaacaatacggacaggttgccaccaaccatcagagtcagaacaccacagcttcctatggaagtgtggacagccagggaatcttacctggaatggtgtggcaggaccgcgatgtctatcttcaaggtcccatttgggccaaaactcctcacacggacggacactttcatccttctccgctcatgggaggctttggactgaaacaccctcctccccagatcctgatcaaaaacacacctgtgccagcgaatcccgcgaccactttcactcctggaaagtttgcttcgttcattacccagtattccacctgacaggtcagcgtggaaatagagtgggagctgcagaaagaaaacagcaaacgctggaacccagaaattcagtacacctccaactacaacaagtcggtgaatgtggagtttaccgtggacgcaaacggtgtttattctgaaccccgccctattggcactcgttaccttacccggaacttgtaatttcctgttaatgaataagccgatttatgcgtttcagttgaactttggtctctgcgaagggcgaattcgtttaaacct

SEQ ID NO: 141 - protein, 735 aa, synthetic construct
  REGION 1..735: note = source = /note="Description of Artificial Sequence: Synthetic polypeptide"
MAADGYLPDWLEDTLSEGIRQWWKLKPGPPPPKPNQQHRDDSRGLVLPGYKYLGPFNGLDKGEPVNEADAAALEHDKAYDHQLKQGDNPYLKYNHADAEFQERLQEDTSFGGNLGRAVFQAKKRVLEPLGLVEEAVKTAPGKKRPIEQSPAEPDSSSGIGKSGQQPAKKRLNFGQTGDTESVPGPQPIGEPPAAPSGVGSNTMASGGGAPMADNNEGADGVGNSSGNWHCDSTWMGDRVITTSTRTWALPTYNNHLYKQISSESGATNDNHYFGYSTPWGYFDFNRFHCHFSPRDWQRLINNNWGFRPKKLNFKLFNIQVKEVTQNDGTTTIANNLTSAVQVFTDSEYQLPYVLGSAHQGCLPPFPADVFMIPQYGYLTLNNGSQAVGRSSFYCLEYFPSQMLRTGNNFTFSYTFEDVPFHSSYAHSQSLDRLMNPLIDQYLYYLSKTQGTSGTTQQSRLQFSQAGPSSMAQQAKNWLPGPSYRQQRMSKTANDNNNSEFAWTAATKYYLNGRNSLVNPGPPVASHKDDEEKYFPMHGNLIFGKQGTGTTNVDIESVLITDEEEIRTTNPVATEQYGQVATNHQSQNTTASYGSVDSQGILPGMVWQDRDVYLQGPIWAKTPHTDGHFHPSPLMGGFGLKHPPPQILIKNTPVPANPATTFTPGKFASFITQYSTGQVSVEIEWELQKENSKRWNPEIQYTSNYNKSVNVEFTVDANGVYSEPRPIGTRYLTRNL

SEQ ID NO: 142 - DNA, 3123 bp, synthetic construct
  misc_feature 1..3123: note = source = /note="Description of Artificial Sequence: Synthetic polynucleotide"
  source 1..3123: mol_type = other DNA
gaattcgccctttctacggctgcgtcaactggaccaatgaaaactttcccttcaacgattgcgtcgacaagatggtgatctggtgggaggagggaaagatgaccgccaaggtcgtggaatctgccaaagccattctgggtggaagcaaggttcgtgtggaccagaaatgcaagtcttcggcccagatcgacccgactccggtgattgtcacctctaacaccaacatgtgcgccgtgattgacggaaactcgaccaccttcgagcaccagcagccgttgcaagaccggatgttcaaatttgaacttacccgccgtttggatcatgactttgggaaggtcaccaagcaggaagtcaaagactttttccggtgggctcaagatcacgtgactgaggtggagcatgagttctacgtcaaaaagggtggagccaagaaaaggcccgcccccgatgatgtatatataaatgagcccaagcgggcgcgcgagtcagttgcgcagccatcgacgtcagacgcggaagcttcgataaactacgcgggcaggtaccaaaacaaatgttctcgtcacgtgggcatgaatctgatgctgtttccctgtcgacaatgcgaaagaatgaatcagaattcaaatatctgcttcacacacgggcaaaaagactgtttggaatgctttcccgtgtcagaatctcaacccgtttctgtcgtcagaaaaacgtatcagaaactttgttacattcatcatatcatgggaaaagaaccagacgcctgcactgcctgcgacctggtaaatgtggacttggatgactgtatttctgagcaataaatgacttaaatcaggtatggctgctgacggttatcttccagattggctcgaggacactctctctgaaggaatcagacagtggtggaagctcaaacctggcccaccaccgccgaaacctaaccaacaacaccgggacgacagtaggggtcttgtgcttcctgggtacaagtacctcggacccttcaacggactcgacaaaggagagccggtcaacgaggcagacgccgcggccctcgagcacgacaaagcctacgaccaccagctcaagcaaggggacaacccgtacctcaaatacaaccacgcggacgctgaatttcaggagcgtcttcaagaagatacgtctttcgggggcaacctcgggcgagcagtcttccaggccaaaaagagggtactcgagcctcttggtctggttgaggaagctgttaagacggctcctggaaaaaagagacctatagagcagtctcctgcagaaccggactcttcctcgggcatcggcgaatcaggccagcagcccgctaagaaaagactcaattttggtcagactggcgacacagagtcagtcccagaccctcaaccaatcggagaaccccccgcagccccctctggtgtgggatctaatacaatggcttcaggcggtggggcaccaatggcagacgataacgaaggcgccgacggagtgggtaattcctcgggaaattggcattgcgattccacatggatgggcgacagagttatcaccaccagcacaagaacctgggccctccccacctacaataatcacctctacaagcaaatctccagcgaatcgggagccaccaacgacaaccactacttcggctacagcaccccctgggggtattttgactttaacagattccactgtcacttctcaccacgtgactggcagcgactcatcaacaacaactggggatttagacccaagaaactcaatttcaagctcttcaacatccaagtcaaggaggtcacgcagaatgatggaaccacgaccatcgccaataaccttaccagcacggtgcaggtcttcacagactctgagtaccagctgccctacgtcctcggttcggctcaccagggctgccttccgccgttcccagcagacgtcttcatgattcctcagtacggctacttgactctgaacaatggcagccaagcggtaggacgttcttcattctactgtctagagtattttccctctcagatgctgaggacgggaaacaacttcaccttcagctacacttttgaagacgtgcctttccacagcagctacgcgcacagccagagtctggatcggctgatgaatcctctcattgaccagtacctgtattacctgagcaaaactcagggtacaagtggaacaacgcagcaatcgagactgcagttcagccaagctgggcctagctccatggctcagcaggccaaaaactggctaccgggacccagctaccgacagcagcgaatgtctaagacggctaatgacaacaacaacagtgaatttgcttggactgcagccaccaaatattacctgaatggaagaaattctctggtcaatcccgggcccccaatggccagtcacaaggacgatgaggaaaagtatttccccatgcacggaaatctcatctttggaaaacaaggcacaggaactaccaatgtggacattgaatcagtgcttattacagacgaagaagaaatcagaacaactaatcctgtggctacagaacaatacggacaggttgccaccaaccatcagagtcaggacaccacagcttcctatggaagtgtggacagccagggaatcttacctggaatggtgtggcaggaccgcgatgtctatcttcaaggtcccatttgggccaaaactcctcacacggacggacactttcatccttctccgctcatgggaggctttggactgaaacaccctcctccccagatcctgatcaaaaacacacctgtgccagcgaatcccgcgaccactttcactcctggaaagtttgcttcgttcattacccagtattccaccggacaggtcagcgtggaaatagagtgggagctgcagaaagaaaacagcaaacgctggaacccagaaattcagtacacctccaactacaacaagtcggtgaatgtggagtttaccgtggacgcaaacggtgtttattctgaaccccgccctattggcactcgttaccttacccggaacttgtaatttcctgttaatgaataaaccgatttatgcgtttcagttgaactttggtctctgcgaagggcgaattcgcggccgcta

SEQ ID NO: 143 - protein, 735 aa, synthetic construct
  REGION 1..735: note = source = /note="Description of Artificial Sequence: Synthetic polypeptide"
MAADGYLPDWLEDTLSEGIRQWWKLKPGPPPPKPNQQHRDDSRGLVLPGYKYLGPFNGLDKGEPVNEADAAALEHDKAYDHQLKQGDNPYLKYNHADAEFQERLQEDTSFGGNLGRAVFQAKKRVLEPLGLVEEAVKTAPGKKRPIEQSPAEPDSSSGIGESGQQPAKKRLNFGQTGDTESVPDPQPIGEPPAAPSGVGSNTMASGGGAPMADDNEGADGVGNSSGNWHCDSTWMGDRVITTSTRTWALPTYNNHLYKQISSESGATNDNHYFGYSTPWGYFDFNRFHCHFSPRDWQRLINNNWGFRPKKLNFKLFNIQVKEVTQNDGTTTIANNLTSTVQVFTDSEYQLPYVLGSAHQGCLPPFPADVFMIPQYGYLTLNNGSQAVGRSSFYCLEYFPSQMLRTGNNFTFSYTFEDVPFHSSYAHSQSLDRLMNPLIDQYLYYLSKTQGTSGTTQQSRLQFSQAGPSSMAQQAKNWLPGPSYRQQRMSKTANDNNNSEFAWTAATKYYLNGRNSLVNPGPPMASHKDDEEKYFPMHGNLIFGKQGTGTTNVDIESVLITDEEEIRTTNPVATEQYGQVATNHQSQDTTASYGSVDSQGILPGMVWQDRDVYLQGPIWAKTPHTDGHFHPSPLMGGFGLKHPPPQILIKNTPVPANPATTFTPGKFASFITQYSTGQVSVEIEWELQKENSKRWNPEIQYTSNYNKSVNVEFTVDANGVYSEPRPIGTRYLTRNL

SEQ ID NO: 144 - DNA, 3113 bp, synthetic construct
  misc_feature 1..3113: note = source = /note="Description of Artificial Sequence: Synthetic polynucleotide"
  source 1..3113: mol_type = other DNA
gaattcgccctttctacggctgcgtcaactggaccaatgaaaactttcccttcaacgattgcgtcgacaagatggtgatctggtgggaggagggaaagatgaccgccaaggtcgtggaatctgccaaagccattctgggtggaagcaaggttcgtgtggaccagaaatgcaagtcttcggcccagatcgacccgactccggtgattgtcacctctaacaccaacatgtgcgccgtgattgacggaaactcgaccaccttcgagcaccagcagccgttgcaagaccggatgttcaaatttgaacttacccgccgtttggatcatgactttgggaaggtcaccaagcaggaagtcaaagactttttccggtgggctcaagatcacgtgactgaggtggagcatgagttctacgtcaaaaagggtggagccaagaaaaggcccgcccccgatgatgtatatataaatgagcccaagcgggcgcgcgagtcagttgcgcagccatcgacgtcagacgcggaagcttcgataaactacgcggacaggtaccaaaacaaatgttctcgtcacgtgggcatgaatctgatgctgtttccctgtcgacaatgcgaaagaatgaatcagaattcaaatatctgcttcacacacgggcaaaaagactgtttggaatgctttcccgtgtcagaatctcaacccgttcctgtcgtcagaaaaacgtatcagaaactttgttacattcatcatatcatgggaaaagtaccagacgcctgcactgcctgcgacctggtaaatgtggacttggatgactgtatttctgagcaataaatgacttaaatcaggtatggctgctgacggttatcttccagattggctcgaggacactctctctgaaggaatcagacagtggtggaagctcaaacctggcccaccaccgccgaaacctaaccaacaacaccgggacgacagtaggggtcttgtgcttcctgggtacaagtacctcggacccttcaacggactcgacaaaggagagccggtcaacgaggcagacgccgcggccctcgagcacgacaaagcctacgaccaccagctcaagcaaggggacaacccgtacctcaaatacaaccacgcggacgctgaatttcaggagcgtcttcaagaagatacgtctttcgggggcaacctcgggcgagcagtcttccaggccaaaaagagggtactcgagcctcttggtctggttgaggaagctgttaagacggctcctggaaaaaagagacctatagagcagtctcctgcagaaccggactcttcctcgggcatcggcaaatcaggccagcagcccgctaagaaaagactcaattttggtcagactggcgacacagagtcagtcccagaccctcaaccaatcggagaaccccccgcagccccctctggtgtgggatctaatacaatggcttcaggcggtggggcaccaatggcagacaataacgaaggcgccgacggagtgggtaattcctcgggaaattggcattgcgattccacatggatgggcgacagagttatcaccaccagcacaagaacctgggccctccccacctacaataatcacctctacaagcaaatctccagcgaatcgggagccaccaacgacaaccactacttcggctacagcaccccctgggggtattttgactttaacagattccactgtcacttctcaccacgtgactggcagcgactcatcaataacaactggggatttagacccaagaaactcaatttcaagctcttcaacatccaagtcaaggaggtcacgcagaatgatggaaccacgaccatcgccaataaccttaccagcacggtgcaggtcttcacagactctgagtaccagctgccctacgtcctcggttcggctcaccagggctgccttccgccgttcccagcagacgtcttcatgattcctcagtacggctacttgactctgaacaatggcagccaagcggtaggacgttcttcattctactgtctagagtattttccctctcagatgctgaggacgggaaacaacttcaccttcagctacacttttgaagacgtgcctttccacagcagctacgcgcacagccagagtctggatcggctgatgaatcctctcattgaccagtacctgtattacctgagcaaaactcagggtacaagtggaacaacgcagcaatcgagactgcagttcaaccaagctgggcctagctccatggctcagcaggccaaaaactggctaccgggacccagctaccgacagcagcgaatgtctaagacggctaatgacaacaacaacagtgaatttgcttggactgcagccaccaaatattacccgaatggaagaaattctctggtcaatcccgggcccccaatggccagtcacaaggacgatgaggaaaagtatttccccatgcacggaaatctcatctttggaaaacaaggcacaggaactaccaatgtggacattgaatcagtgcttattacagacgaagaagaaatcagaacgactaatcctgtggctacagaacaatacggacaggttgccaccaaccgtcagagtcagaacaccacagcttcctatggaagtgtggacagccagggaatcttacctggaatggtgtggcaggaccgcgatgtctatcttcaaggtcccatttgggccaaaactcctcacacggacggacactttcatccttctccgctcatgggaggctttggactgaaacaccctcctccccagatcctgatcaaaaacacacctgtgccagcgaatcccgcgaccactttcactcctggaaagtttgcttcgttcattacccagtattccaccggacaggtcagcgtggaaatagagtgggagctgcagaaagaaaacagcaaacgctggaacccggaaattcagtacacctccaactacaacaagtcggtgaatgtggagtttaccgtggacgcaaacggtgtttattctgaaccccgccctattggcactcgttaccttacccggaacttgtaatttcctgttaatgaataaaccgatttatgcgtttcagttgaactttggtctctgcgaagggcgaattc

SEQ ID NO: 145 - protein, 735 aa, synthetic construct
  REGION 1..735: note = source = /note="Description of Artificial Sequence: Synthetic polypeptide"
MAADGYLPDWLEDTLSEGIRQWWKLKPGPPPPKPNQQHRDDSRGLVLPGYKYLGPFNGLDKGEPVNEADAAALEHDKAYDHQLKQGDNPYLKYNHADAEFQERLQEDTSFGGNLGRAVFQAKKRVLEPLGLVEEAVKTAPGKKRPIEQSPAEPDSSSGIGKSGQQPAKKRLNFGQTGDTESVPDPQPIGEPPAAPSGVGSNTMASGGGAPMADNNEGADGVGNSSGNWHCDSTWMGDRVITTSTRTWALPTYNNHLYKQISSESGATNDNHYFGYSTPWGYFDFNRFHCHFSPRDWQRLINNNWGFRPKKLNFKLFNIQVKEVTQNDGTTTIANNLTSTVQVFTDSEYQLPYVLGSAHQGCLPPFPADVFMIPQYGYLTLNNGSQAVGRSSFYCLEYFPSQMLRTGNNFTFSYTFEDVPFHSSYAHSQSLDRLMNPLIDQYLYYLSKTQGTSGTTQQSRLQFNQAGPSSMAQQAKNWLPGPSYRQQRMSKTANDNNNSEFAWTAATKYYPNGRNSLVNPGPPMASHKDDEEKYFPMHGNLIFGKQGTGTTNVDIESVLITDEEEIRTTNPVATEQYGQVATNRQSQNTTASYGSVDSQGILPGMVWQDRDVYLQGPIWAKTPHTDGHFHPSPLMGGFGLKHPPPQILIKNTPVPANPATTFTPGKFASFITQYSTGQVSVEIEWELQKENSKRWNPEIQYTSNYNKSVNVEFTVDANGVYSEPRPIGTRYLTRNL

SEQ ID NO: 146 - DNA, 3122 bp, synthetic construct
  misc_feature 1..3122: note = source = /note="Description of Artificial Sequence: Synthetic polynucleotide"
  source 1..3122: mol_type = other DNA
agcggccgcgaattcgccctttctacggctgcgtcaactggaccaatgaaaactttcccttcaacgattgcgtcgacaagatggtgatctggtgggaggagggaaagatgaccgccaaggtcgtggaatctgccaaagccattctgggtggaagcaaggttcgtgtggaccagaaatgcaggtcttcggcccagatcgacccgactccggtgattgtcacctctaacaccaacatgtgcgccgtgattgacggaaactcgaccaccttcgagcaccagcagccgttgcaagaccggatgttcaaatttgaacttacccgccgtttggatcatgactttgggaaggtcaccaagcaggaagtcaaagactttttccggtgggctcaagatcacgtgactgaggtggagcatgagttctacgtcaaaaagggtggagccaagaaaaggcccgcccccgatgatgtatatataaatgagcccaagcgggcgcgcgagtcagttgcgcagccatcgacgtcagacgcggaagcttcgataaactacgcggacaggtaccaaaacaaatgttctcgtcacgtgggcatgaatctgatgctgtttccctgtcgacaatgcgaaagaatgaatcagaattcaaatatctgcttcacacacgggcaaaaagactgtttggaatgctttcccgtgtcagaatctcaacccgtttctgtcgtcagaaaaacgtatcagaaactttgttacattcatcatatcatgggaaaagtaccagacgcctgcactgcctgcgacctggtaaatgtggacttggatgactgtatttctgagcaataaatgacttaaatcaggtatggctgctgacggttatcttccagattggctcgaggacactctctctgaaggaatcagacagtggtggaagctcaaacctggcccaccaccgccgaaacctaaccaacaacaccgggacgacagtaggggtcttgtgcttcctgggtacaagtacctcggacccttcaacggactcgacaaaggagagccggtcaacgaggcagacgccgcggccctcgagcacgacaaagcctacgaccaccagctcaagcaaggggacaacccgtacctcaaatacaaccacgcggacgctgaatttcaggagcgtcttcaagaagatacgtctttcgggggcaacctcgggcgagcagtcttccaggccaaaaagagggtactcgagcctcttggtctggttgaggaagctgttaagacggctcctggaaaaaagagacctatagagcagtctcctgcagaaccggactcttcctcgggcatcggcaaatcaggccagcagcccgctaagaaaagactcaattttggtcagactggcgacacagagtcagtcccagaccctcaaccaatcggagaaccccccgcagccccctctggtgtgggatctaatacaatggcttcaggcggtggggcaccaatggcagacaataacgaaggcgccgacggagtgggtaattcctcgggaaattggcattgcgattccacatggatgggcgacagagttatcaccaccagcacaagaacctgggccctccccacctacaataatcgcctctacaagcaaatctccagcgaatcgggagccaccaacgacaaccactacttcggctacagcaccccctgggggtattttgactttaacagattccactgtcacttctcaccacgtgactggcagcgactcatcaacaacaactggggatttagacccaagaaactcaatttcaagctcttcaacatccaagtcaaggaggtcacgcagaatgatggaaccacgaccatcgccaataaccttaccagcacggtgcaggtcttcacagactctgagtaccagctgccctacgtcctcggttcggctcaccagggctgccttccgccgttcccagcagacgtcttcatgattcctcagtacggctacttgactctgaacaatggcagccaagcggtaggacgttcttcattctactgtctagagtattttccctctcagatgctgaggacgggaaacaacttcaccttcagctacacttttgaagacgtgcctttccacagcagctacgcgcacagccagagtctggatcggctgatgaatcctctcattgaccagtacctgtattacctgagcaaaactcagggtacaagtggaacaacgcagcaatcgagactgcagttcagccaagctgggcctagctccatggctcagcaggccaaaaactggctaccgggacccagctaccgacagcagcgaatgtctaagacggctaatgacaacaacaacagtgaatttgcttggactgcagccaccaaatattacctgaatggaagaaattctctggtcaatcccgggcccccaatggccagtcacaaggacgatgaggaaaagtatttccccatgcacggaaatctcatctttggaaaacaaggcacaggaactaccaatgtggacattgaatcagtgcttattacagacgaagaagaaatcagaacaactaatcctgtggctacagaacaatacggacaggttgccaccaaccatcagagtcagaacaccacagcttcctatggaagtgtggacagccagggaatcttacctggaatggtgtggcaggaccgcgatgtctatcttcaaggtcccatttgggccaaaactcctcacacggacggacactttcatccttctccgctcatgggaggctttggactgaaacaccctcctccccagatcctgatcaaaaacacacctgtgccagcgaatcccgcgaccactttcactcctggaaagtttgcttcgttcattacccagtattccaccggacaggtcagcgtggaaatagagtgggagctgcagaaagaaaacagcaaacgctggaacccagaaattcagtacacctccaactacaacaagtcggtgaatgtggagtttaccgtggacgcaaacggtgtttattctgaaccccgccctattggcactcgttaccttacccggaacttgtaatttcctgttaatgaataaaccgatttatgcgtttcagttgaactttggtctctgcgaagggcgaattc

SEQ ID NO: 147 - protein, 735 aa, synthetic construct
  REGION 1..735: note = source = /note="Description of Artificial Sequence: Synthetic polypeptide"
MAADGYLPDWLEDTLSEGIRQWWKLKPGPPPPKPNQQHRDDSRGLVLPGYKYLGPFNGLDKGEPVNEADAAALEHDKAYDHQLKQGDNPYLKYNHADAEFQERLQEDTSFGGNLGRAVFQAKKRVLEPLGLVEEAVKTAPGKKRPIEQSPAEPDSSSGIGKSGQQPAKKRLNFGQTGDTESVPDPQPIGEPPAAPSGVGSNTMASGGGAPMADNNEGADGVGNSSGNWHCDSTWMGDRVITTSTRTWALPTYNNRLYKQISSESGATNDNHYFGYSTPWGYFDFNRFHCHFSPRDWQRLINNNWGFRPKKLNFKLFNIQVKEVTQNDGTTTIANNLTSTVQVFTDSEYQLPYVLGSAHQGCLPPFPADVFMIPQYGYLTLNNGSQAVGRSSFYCLEYFPSQMLRTGNNFTFSYTFEDVPFHSSYAHSQSLDRLMNPLIDQYLYYLSKTQGTSGTTQQSRLQFSQAGPSSMAQQAKNWLPGPSYRQQRMSKTANDNNNSEFAWTAATKYYLNGRNSLVNPGPPMASHKDDEEKYFPMHGNLIFGKQGTGTTNVDIESVLITDEEEIRTTNPVATEQYGQVATNHQSQNTTASYGSVDSQGILPGMVWQDRDVYLQGPIWAKTPHTDGHFHPSPLMGGFGLKHPPPQILIKNTPVPANPATTFTPGKFASFITQYSTGQVSVEIEWELQKENSKRWNPEIQYTSNYNKSVNVEFTVDANGVYSEPRPIGTRYLTRNL

SEQ ID NO: 148 - DNA, 3121 bp, synthetic construct
  misc_feature 1..3121: note = source = /note="Description of Artificial Sequence: Synthetic polynucleotide"
  source 1..3121: mol_type = other DNA
gaattcgcccttcgcagagaccaaagttcaactgaaacgaatcaaccggtttattgattaacaagcaattacagattacgggtgaggtaacgggtgccgatggggcgaggctcagaataagtgccatctgtgttaacagcaaagtccacatttgtagatttgtagtagttggaagtgtattgaatctctgggttccagcgtttgctgttttctttctgcagctcccattcaatttccacgctgacctgtccggtgctgtactgcgtgatgaacgacgccagcttagcttgactgaaggtagttggaggatccgcgggaacaggtgtattcttaatcaggatctgaggaggcgggtgtttcagtccaaagccccccatcagcggcgagggatgaaagtttccgtccgtgtgaggaatcttggcccagataggaccctgcaggtacacgtcccggttctgccagaccatgccaggtaaggctccttgactgttgacggcccctacaataggagcggcgttttgctgttgcaggttatcggccaccacgccgtactgttctgtggccactgggttggtggttttaatttcttcctcactggttagcataacgctgctatagtccacgttgccttttccagctccctgtttcccaaacattaagactccgctggacggaaaaaatcgctcttcgtcgtccttgtgggttgccatagcgacaccgggatttaccagagagtctctgccattcagatgatacttggtggcaccggtccaggcaaagttgctgttgttattttgcgacagtgtcgtggagacgcgttgctgccggtagcagggcccgggtagccagtttttggcctgagccgacatgttattaggcccggcctgagaaaatagcaactgctgagttcctgcggtacctcccgtggactgagtccgagacaggtagtacaggtactggtcgatgagggggttcatcagccggtccaggctttggctgtgcgcgtagctgctgtgaaaaggcacgtcctcaaactggtagctgaactcaaagttgttgcccgttctcagcatttgagaaggaaagtactccaggcagtagaaggaggaacggcccacggcctgactgccattgttcagagtcaggtacccgtactgaggaatcatgaagacgtccgccgggaacggaggcaggcagccctggcgcgcagagccgaggacgtacgggagctggtattccgagtccgtaaagacctgaatcgtgctggtaaggttattggcgatggtcttggtgccttcattctgcgtgacctccttgacctggatgttgaagagcttgaagttgagtctcttgggccggaatccccagttgttgttgatgagtcgctgccagtcacgtggtgagaagtggcagtggaatctgttaaagtcaaaatacccccagggggtgctgtagccgaagtaggtgttgtcgttggtgcttcctcccgaagtcccgttggagatttgcttgtagaggtggttgttgtaggtggggagggcccaggttcgggtgctggtggtgatgactctgtcgcccagccatgtggaatcgcaatgccaatttcctgaggaactacccactccgtcggcgccttcgttattgtctgccattggagcgccaccgcctgcagccattgtaccagatcccagaccagaggggcctgcggggggttctccgattggttgagggtcgggcactgactctgagtcgccagtctgcccaaagttgagtctctttttcgcgggctgctggcctttcttgccgatgcccgtagtggagtctggagaacgctggggtgatggctctaccggtctcttctttccaggagccgtcttagcgccttcctcaaccagaccgagaggttcgagaacccgcttcttggcctggaagactgctcgtccgaggttgcccccaaaagacgtatcttcttgcagacgctcctgaaactcggcgtcggcgtggttataccgcaggtacggattgtcacccgctttgagctgctggtcgtaggccttgtcgtgctcgagggccgctgcgtccgccgcgttgacgggctcccccttgtcgagtccgttgaagggtccgaggtacttgtagccaggaagcaccagaccccggccgtcgtcctgcttttgctggttggctttgggcttcggggctccaggtttcagcgcccaccactcgcgaatgccctcagagaggttgtcctcgagccaatctggaagataaccatcggcagccatacctgatctaaatcatttattgttcaaagatgcagtcatccaaatccacattgaccagatcgcaggcagtgcaagcgtctggcacctttcccatgatatgatgaatgtagcacagtttctgatacgcctttttgacgacagaaacgggttgagattctgacacgggaaagcactctaaacagtctttctgtccgtgagtgaagcagatatttgaattctgattcattctctcgcattgtctgcagggaaacagcatcagattcatgcccacgtgacgagaacatttgttttggtacctgtccgcgtagttgatcgaagcttccgcgtctgacgtcgatggctgcgcaactgactcgcgcacccgtttgggctcacttatatctgcgtcactgggggcgggtcttttcttggctccaccctttttgacgtagaattcatgctccacctcaaccacgtgatcctttgcccaccggaaaaagtctttgacttcctgcttggtgaccttcccaaagtcatgatccagacggcgggtgagttcaaatttgaacatccggtcttgcaacggctgctggtgttcgaaggtcgttgagttcccgtcaatcacggcgcacatgttggtgttggaggtgacgatcacgggagtcgggtctatctgggccgaggacttgcatttctggtccacgcgcaccttgcttcctccgagaatggctttggccgactccacgaccttggcggtcatcttcccctcctcccaccagatcaccatcttgtcgacacagtcgttgaagggaaagttctcattggtccagttgacgcagccgtagaagggcgaattc

SEQ ID NO: 149 - protein, 733 aa, synthetic construct
  REGION 1..733: note = source = /note="Description of Artificial Sequence: Synthetic polypeptide"
MAADGYLPDWLEDNLSEGIREWWDLKPGAPKLKANQQKQDDGRGLVLPGYKYLGPFHGLDKGEPVNAADAAALEHDKAYDQQLKAGDNPYLRYNHADAEFQERLQEDTSFGGNLGRAVFQAKKRVLEPLGLVEEGAKTAPGKKRPLESPQEPDSSSGIGKKGKQPAKKRLNFEEDTGAGDGPPEGSDTSAMSSDIEMRAAPGGNAVDAGQGSDGVGNASGDWHCDSTWSEGKVTTTSTRTWVLPTYNNHLYLRLGTTSNSNTYNGFSTPWGYFDFNRFHCHFSPRDWQRLINNNWGLRPKAMRVKIFNIQVKEVTTSNGETTVANNLTSTVQIFADSSYELPYVMDAGQEGSLPPFPNDVFMVPQYGYCGIVTGENQNQTDRNAFYCLEYFPSQMLRTGNNFEMAYNFEKVPFHSMYAHSQSLDRLMNPLLDQYLWHLQSTTSGETLNQGNAATTFGKIRSGDFAFYRKNWLPGPCVKQQRFSKTASQNYKIPASGGNALLKYDTHYTLNNRWSNIAPGPPMATAGPSDGDFSNAQLIFPGPSVTGNTTTSANNLLFTSEGEIAATNPRDTDMFGQIADNNQNATTAPITGNVTAMGVLPGMVWQNRDIYYQGPIWAKIPHADGHFHPSPLIGGFGLKHPPPQIFIKNTPVPANPATTFTAARVDSFITQYSTGQVAVQIEWEIEKERSKRRNPEVQFTSNYGNQSSMLWAPDTTGKYTEPRVIGSRYLTNHL

SEQ ID NO: 150 - protein, 735 aa, synthetic construct
  REGION 1..735: note = source = /note="Description of Artificial Sequence: Synthetic polypeptide"
MAADGYLPDWLEDTLSEGIRQWWKLKPGPPPPKPNQQHRDDSRGLVLPGYKYLGPFNGLDKGEPVNEADAAALEHDKAYDHQLKQGDNPYLKYNHADAEFQERLQEDTSFGGNLGRAVFQAKKRVLEPLGLVEEAVKTAPGKKRPIEQSPAEPDSSSGIGKSGQQPAKKRLNFGQTGDTESVPDPQPIGEPPAAPSGVGSNTMASGGGAPMADNNEGADGVGNSSGNWHCDSTWMGDRVITTSTRTWALPTYNNHLYKQISSESGATNDNHYFGYSTPWGYFDFNRFHCHFSPRDWQRLINNNWGFRPKKLNFKLFNIQVKEVTQNDGTTTIANNLTSTVQVFTDSEYQLPYVLGSAHQGCLPPFPADVFMIPQYGYLTLNNGSQAVGRSSFYCLEYFPSQMLRTGNNFTFSYTFEDVPFHSSYAHSQSLDRLMNPLIDQYLYYLSKTQGTSGTTQQSRLQFSQAGPSSMAQQAKNWLPGPSYRQQRMSKTANDNNNSEFAWTAATKYYLNGRNSLVNPGPPMASHKDDEEKYFPMHGNLIFGKQGTGTTNVDIESVLITDEEEIRTTNPVATEQYGQVATNHQSQNTTASYGSVDSQGILPGMVWQDRDVYLQGPIWAKIPHTDGHFHPSPLMGGFGLKHPPPQILIKNTPVPANPATTFTPGKFASFITQYSTGQVSVEIEWELQKENSKRWNPEIQYTSNYNKSVNVEFTVDANGVYSEPRPIGTRYLTRNL

SEQ ID NO: 151 - DNA, 3127 bp, synthetic construct
  misc_feature 1..3127: note = source = /note="Description of Artificial Sequence: Synthetic polynucleotide"
  source 1..3127: mol_type = other DNA
gcggccgcgaattcgcccttcgcagagaccaaagttcaactgaaacgaatcaaccggtttattgattaacatgcaattacagattacgggtgaggtaacgagtgccaatagggcgaggctcagagtaaacaccctggctgtcaacggcaaagtccacaccagtctgcttttcaaagttggaggtgtactgaatctccgggtcccagcgcttgctgttttccttctgcagctcccactcgatttccacgctgacttgtccggtgctgtactgtgtgatgaacgaagcaaacttggcaggagtaaacacctccggaggattagcgggaacgggagtgttcttgatcaggatctgaggaggcggatgtttaagtccaaagccgcccatcaaaggagacgggtgaaagttgccatccgtgtgaggaatcttggcccagatgggaccctgcaggtacacgtcccggttctgccagaccatgccaggtaaggctccctggttgttgacaacttgtgtctgggctgcagtattagccgcttgtaagttgctgctgactatcccgtattcttccgtggctacaggattagtaggacgaatttcttcttcatttgtcattaacacattttccaatgtagttttgttagttgctccagtttttccaaaaatcaggactccgctggatgggaaaaagcggtcctcgtcgtccttgtgagttgccatggcgacgccgggattaaccaacgagtttctgccgttcaggtgatatttggtggcaccagtccaagcaaagttgctgttgttgttttgatccagcgttttggagaccctttgttgccggaagcagggtccaggtaaccaattcttggcttgttcggccatagttgaaggcccgccctggtaaaactgcagttcccgattgccagctgtgcctcctgggtcactctgtgttctggccaggtagtacaagtactggtcgatgaggggattcatcagccggtccaggctctggctgtgtgcgtagctgctgtggaaaggcacgtcctcgaagctgtagctgaactcaaagttgttgcccgttctcagcatctgagaggggaagtactccaggcagtagaaggaggaacgtcccacagactgactgccattgttgagagtcaggtagccgtactgaggaatcatgaagacgtccgccgggaacggaggcaggcagccctggtgcgcagagccgaggacgtacggcagctggtattccgagtccgagaatacctgaatcgtgctggtaaggttattagcgatggtcgtaacgccgtcattcgtcgtgacctccttgacctggatgttgaagagcttgaaccgcagcttcttgggccggaatccccagttgttgttgatgagtcgctgccagtcacgtggtgagaagtggcagtggaatctgttaaagtcaaaatacccccagggggtgctgtagccgaagtaggtgttgtcgttggtactacctgcagtttcactggagatttgctcgtagaggtggttgttgtaggtgggcagggcccaggttcgggtgctggtggtaatgactctgtcgcccagccatgtggaatcgcaatgccaatttcctgaggcattacccactccgtcggcaccttcgttattgtctgccattggtgcgccaccgcctgcagccactgtaccagatcccacactagagggcgctgctggaggttctccgagaggttgagggtcggggactgactctgagtcgccagtctgaccgaaattgagtctctttctggcgggctgctggcccttcttgccgatgcccgtggaggagtcgggggaacgctgaggtgacggctctaccggtctcttctttgcaggagccgtcttagcgccttcctcaaccagaccgagaggttcgagaacccgcttcttggcctggaagactgctcgcccgaggttgcccccaaatgacgtatcttcttgcagacgctcctgaaactcggcgtcggcgtggttataccgcaggtacgggttgtcacccgcattgagctgctggtcgtaggccttgtcgtgctcgagggccgctgcgtccgccgcgttgacgggctcccccttgtcgagtccgttgaagggtccgaggtacttgtagccaggaagcaccagaccccggccgttgtcctgcttttgctggttggctttgggtttcggggctccaggtttcaggtcccaccactcgcgaatgccctcagagaggttgtcctcgagccaatctggaagataaccatcggcagccatacctgatttaaatcatttattgttcaaagatgcagtcatccaaatccacattgaccagatcgcaggcagtgcaagcgtctggcacctttcccatgatatgatgaatgtagcacagtttctgatacgcctttttgacgacagaaacgggtttagattctgacacgggaaagcactctaaacagtctttctgtccgtgagtgaagcagatatttgaattctgattcattctctcgcattgtctgcagggaaacagcatcagattcatgcccacgtgacgagaacatttgttttggtacctgtctgcgtagttgatcgaagcttccgcgtctgacgtcgatggctgcgcaactgactcgcgcacccgtttgggctcacttatatctgcgtcactgggggcgggtcttttcttggctccaccctttttgacgtagaattcatgctccacctcaaccacgtaatcctttgcccaccggaaaaagtctttgacttcctgcttggtgaccttcccaaagtcatgatccagacggcgggtgagttcaaatttgaacatccggtcttgcaacggctgctggtgttcgaaggtcgttgagttcccgtcgatcacggcgcacatgttggtgttggagatgacgatcgcgggagtcgggtctatctgggccgaggacttgcatttctggtccacgcgcaccttgcttcctccgagaatggctttggccgactccacgaccttggcggtcatcttcccctcctcccaccagatcaccatcttgtcgacacagtcgttgaagggaaagttctcattggtccagttgacgcagccgtagaaagggcgaattc

SEQ ID NO: 152 - protein, 728 aa, synthetic construct
  REGION 1..728: note = source = /note="Description of Artificial Sequence: Synthetic polypeptide"
MAADGYLPDWLEDNLSEGIREWWDLKPGAPKPKANQQKQDDGRGLVLPGYKYLRPFNGLDKGEPVNEADAAALEHDKAYDKQLEQGDNPYLKYNHADAEFQERLQEDTSFGGNLGRAVFQAKKRVLEPLGLVEEVAKTAPGKKRPIESPDSSTGIGKKGQQPAKKKLNFGQTGDSESVPDPQPLGEPPAAPSGLGSGTMAAGGGAPMADNNEGADGVGNASGNWHCDSTWLGDRVITTSTRTWALPTYNNHLYKQISSQSGATNDNHFFSYSTPWGYFDFNRFHCHFSPRDWQRLINNNWGFRPRKLRFKLFNIQVKEVTTNDGVTTIANNLTSTIQVFSDSEYQLPYVLGSAHQGCLPPFPADVFMIPQYGYLTLNNGSQSVGRSSFYCLEYFPSQMLRTGNNFEFSYTFEEVPFHSSYVHSQSLDRLMNPLIDQYLYYLARTQSTTGSTRELQFHQAGPNTMAEQSKNWLPGPCYRQQRLSKNIDSNNNSNFAWTGATKYHLNGRNSLTNPGVAMATNKDDEDQFFPINGVLVFGKTGAANKTTLENVLMTSEEEIKTTNPVATEEYGVVSSNLQSSTAGPQTQTVNSQGALPGMVWQNRDVCLQGPIWAKIPHTDGNFHPSPLMGGFGLKHPPPQILIKNTPVPANPPEVFTPAKFASFITQYSTGQVSVEIEWELQKENSKRWNPEIQYTSNYAKSNNVEFAVNNEGVYTEPRPIGTRYLTRNL

SEQ ID NO: 153 - DNA, 3106 bp, synthetic construct
  misc_feature 1..3106: note = source = /note="Description of Artificial Sequence: Synthetic polynucleotide"
  source 1..3106: mol_type = other DNA
gcggccgcgaattcgcccttcgcagagaccaaagttcaactgaaacgaatcaaccggtttattgattaacaagtaattacaggttacgggtgaggtaacgggtgccaatggggcgaggctcagtataaaccccttcgttgttgacagcaaattccacattattagacttggcataatttgaggtgtactgaatctctggattccagcgtttgctgttttctttctgcagttcccactcgatctccacgctgacctggccggtgctgtactgcgtgataaatgaggcaaacttggcaggagtaaacacctctggaggattagcaggtaccggggtgtttttgatgagaatttgaggaggcgggtgtttgagtccaaatccgcccatcaggggagacgggtgaaagttgccgtccgtgtgaggaattttggcccagatgggaccctgcaggcacacgtcccggttctgccagaccatgccgggcagagccccctggctgttgacagtctgtgtctggggtccggccgtagacgattgcaggttgctggagaccacaccgtattcttctgtagccacgggattggtggttttgatctcctcctcgctggtcattagcacgttttccagcgttgtcttgttggcagcccccgttttgccaaaaaccagcactccgttgatgggaaagaactggtcctcgtcgtccttgttggtggccatggctacgcccgggttggttaatgaatttctaccattcagatggtatttagtggccccggtccaggcaaagttactgttgttgttgctgtctatgttttttgacagtctctgctgccgataacagggtccgggcagccagttctttgattgctcggccatggtgttgggcccagcctgatggaactgcagctcccttgtggaccccgtagtgctctgggtccgggccaggtagtacaggtactggtcgatgaggggattcatcagccggtctaggctctggctgtgcacatagctgctgtggaaaggcacttcctcaaaggtgtagctgaattcaaagttattgcccgttctcagcatctgagaaggaaagtactccaggcagtagaaggaggaacgtcccacagactgactgccgttgtttagagtcagatatccgtactgaggaatcatgaacacgtccgcagggaacggagggaggcagccctggtgcgcagagccgaggacgtacggcagttggtactccgagtccgagaagacctgaatcgtgctggtaaggttattagcgatggtcgtaacgccgtcgttcgtcgtgacctccttgacctggatgttgaacaacttgaaccgcagctttctgggccggaatccccagttgttgttgatgagtcgctgccagtcacgtggtgagaagtggcagtggaatctgttgaagtcaaaatagccccagggggtgctgtagctgaagaagtggttgtcgttggtagccccgctctgacttgatatctgcttgtagaggtggttgttgtaggtgggcagggcccaggtgcgggtgctggtggtgatgactctgtcgcccagccatgtggaatcgcaatgccaatttccggaggcattacccactccgtcggcgccttcgttattgtctgccattggtgcgccaccgcctgcagccattgtaccagatcccagacctgagggcgcggcgggaggttctccgagaggttgggggtcgggcactgactctgagtcgccagtctgcccaaagttgagcttctttttagcgggctgctggcctttcttgccgatgcccgtggaggagtcgggggattctatgggtctcttctttccaggagccgtcttagcgacttcctcaaccagaccgagaggttcgagaacccgcttcttggcctggaagactgctcgcccgaggttgcccccaaaagacgtatcttcttgaagacgctcctgaaactcggcgtcggcgtggttgtacttgaggtacgggttgtccccctgctcgagctgcttgtcgtaggccttgtcgtgctcgagggccgcggcgtctgcctcgttgaccggctctcccttgtcgagtccgttgaagggtctgaggtacttgtagccaggaagcaccagaccccggccgtcgtcctgcttttgctggttggctttgggtttcggggctccaggtttcaagtcccaccactcgcgaatgccctcagagaggttgtcctcgagccaatctggaagataaccatcggcagccatacctggtttaagtcatttattgctcagaaacacagtcatccaggtccacgttgaccagatcgcaggccgagcaagcaatctcgggagcccgccccagcagatgatgaatggcacagagtttccgatacgtcctctttctgacgaccggttgagattctgacacgccggggaaacattctgaacagtctctggtcccgtgcgtgaagcaaatgttgaaattctgattcactctctcgcatgtcttgcagggaaacagcatctgaagcatgcccgcgtgacgagaacatttgttttggtacctgtcggcaaagtccaccggagctccttccgcgtctgacgtcgatggattcgcgactgaggggcaggcccgcttgggctcgcttttatccgcgtcatcgggggcgggtctcttgttggccccaccctttctgacgtagaacccatgcgccacctcggtcacgtgatcctgcgcccagcggaagaaccttttgacttcctgctttgtcaccttgccaaagttatgctccagacggcgggtgggttcaaatttgaacatccggtcctgcaacggctgctggtgctcgaaggtggcgctgttcccgtcaatcacggcgcacatgttggtgttggaggtgacggtcacgggggtggggtcgatctgggcggacgacttgcacttttggtccacgcgcaccttgctgccgccgagaatggccttggcggactccacgaccttggccgtcatcttgccctcctcccaccagatcaccatcttgtcggcgcaatcgttgaagggaaagttctcattggtccagttgacgcagccgtagaaagggcgaattc

SEQ ID NO: 154 - protein, 728 aa, synthetic construct
  REGION 1..728: note = source = /note="Description of Artificial Sequence: Synthetic polypeptide"
MAADGYLPDWLEDNLSEGIREWWDLKPGAPKPKANQQKQDDGRGLVLPGYKYLGPFNGLDKGEPVNEADAAALEHDKAYDKQLEQGDNPYLKYNHADAEFQERLQEDTSFGGNLGRAVFQAKKRVLEPLGLVEEGAKTASGKKRPIESPDSSTGIGKKGQQPAKKKLNFGQTGDSESVPDPQPLGEPPAAPSGLGSGTMAAGGGAPMADNNEGADGVGNASGNWHCDSTWLGDRVITTSTRTWALPTYNNHLYKQISSQSGATNDNHFFGYSTPWGYFDFNRFHCHFSPRDWQRLINNNWGFRPRKLRFKLFNIQVKEVTTNDGVTTIANNLTSTIQVFSDSEYQLPYVLGSAHQGCLPPFPADVFMIPQYGYLTLNNGSQSVGRSSFCCLEYFPSQMLRTGNNFEFSYTFEEVPFHSSYAHSQSLDRLMNPLIDQYLYYLARTQSTTGSTRELQFHQAGPNTVAEQSKNWLPGPCYRQQRLSKNIDSNNNSNFAWTGATKYHLNGRNSLTNPGVAMATNKDDEDQFLPINGVLVFGKTGAANKTTLENVLMTSEEEIKTTNPVATEEYGVVSSNLQSSTAGPRTQTVNSQGALPGMVWQNRDVYLQGPIWAEIPHTDGNFHPSPLMGGFGLKHPPPQILIKNTPVPANPPEVFTPAKFASFITQYSTGQVSVEIEWELQKENSKRWNPEIQYTSNYAKSNNVEFAVNNEGVYTEPRPIGTRYLTRNL

SEQ ID NO: 155 - DNA, 3102 bp, synthetic construct
  misc_feature 1..3102: note = source = /note="Description of Artificial Sequence: Synthetic polynucleotide"
  source 1..3102: mol_type = other DNA
gcggccgcgaattcgcccttcgcagagaccaaagttcaactgaaacgaatcaaccggtttattgattaacaagtaattacaggttacgggtgaggtaacgggtgccaatggggcgaggctcagtataaaccccttcgttgttgacagcaaattccacattattagacttggcataatttgaggtgtactgaatctctggattccagcgtttgctgttttctttctgcagttcccactcgatctccacgctgacctggccggtgctgtactgcgtgataaatgaggcaaacttggcaggagtaaacacctctggaggattagcaggtaccggggtgtttttgatgagaatttgaggaggcgggtgtttgagtccaaatccgcccatcaggggagacgggtgaaagttgccgtccgtgtgaggaatttcggcccagatgggaccctgcaggtacacgtcccggttctgccagaccatgccgggcagagccccctggctgttgacagtctgtgtccggggtccggccgtagacgattgcaggttgctggagaccacaccgtattcttctgtagccacgggattggtggttttgatctcctcctcgctggtcattagcacgttttccagcgttgtcttgttggcagcccccgttttgccaaaaaccagcactccgttgatgggaaggaactggtcctcgtcgtccttgttggtggccatggctacgcccgggttggttaatgaatttctaccattcagatggtatttagtggccccggtccaggcaaagttactgttgttgttgctgtctatgttttttgacagtctctgctgccgataacagggtccgggcagccagttctttgattgctcggccacggtgttgggcccagcctgatggaactgcagctcccttgtggaccccgtagtgctctgggtccgggccaggtagtacaggtactggtcgatgaggggattcatcagccggtccaggctctggctgtgcgcatagctgctgtggaaaggcacttcctcaaaggtgtagctgaattcaaagttattgcccgttctcagcatctgagaaggaaagtactccaggcagcagaaggaggaacgtcccacagactgactgccgttgtttagagtcagatatccgtactgaggaatcatgaacacgtccgcagggaacggagggaggcagccctggtgcgcagagccgaggacgtacggcagttggtactccgagtccgagaagacctgaatcgtgctggtaaggttattagcgatggtcgtaacgccgtcgttcgtcgtgacctccttgacctggatgttgaacaacttgaaccgcagctttctgggccggaatccccagttgttgttgatgagtcgctgccagtcacgtggtgagaagtggcagtggaatctgttgaagtcaaaatagccccagggggtgctgtagccgaagaagtggttgtcgttggtagccccgctctgacttgatatctgcttgtagaggtggttgttgtaggtgggcagggcccaggtgcgggtgctggtggtgatgactctgtcgcccagccatgtggaatcgcaatgccaatttccggaggcattacccactccgtcggcgccttcgttattgtctgccattggtgcgccaccgcctgcagccattgtaccagatcccagacctgagggcgcggcgggaggttctccgagaggttgggggtcgggcactgactctgagtcgccagtctgcccaaagttgagcttctttttagcgggctgctggcctttcttgccgatgcccgtggaggagtcgggggattctatgggtctcttctttccggaagccgtcttagcgccttcctcaaccagaccgagaggttcgagaacccgcttcttggcctggaagactgctcgcccgaggttgcccccaaaagacgtatcttcttgaagacgctcctgaaactcggcgtcggcgtggttgtacttgaggtacgggttgtccccctgctcgagctgcttgtcgtaggccttgtcgtgctcgagggccgcggcgtctgcctcgttgaccggctctcccttgtcgagtccgttgaagggtccgaggtacttgtagccaggaagcaccagaccccggccgtcgtcctgcttttgctggttggctttgggtttcggggctccaggtttcaagtcccaccactcgcgaatgccctcagagaggttgtcctcgagccaatctggaagataaccatcggcagccatacctggtttaagtcatttattgctcagaaacacagtcatccaggtccacgttgaccagatcgcaggccgagcaagcaatctcgggagcccgccccagcagatgatgaatggcacagagtttccgatacgtcctctttctgacgaccggttgagattctgacacgccggggaaacattctgaacagtctctggtcccgtgcgtgaagcaaatgttgaaattctgattcattctctcgcatgtcttgcagggaaacagcatctgaagcatgcccgcgtgacgagaacatttgttttggtacctgtcggcaaagtccaccggagctccttccgcgtctgacgtcgatggatccgcgactgaggggcaagcccgcttgggctcgcttttatccgcgtcatcgggggcgggtctcttgttggctccaccctttctgacgtagaactcatgcgccacctcggtcacgtgatcctgcgcccagcggaagaactctttgacttcctgctttgtcaccttgccaaagtcatgctccagacggcgggtgagttcaaatttgaacatccggtcttgtaacggctgctggtgctcgaaggtggtgctgttcccgtcaatcacggcgcacatgttggtgttggaagtgacgatcacgggggtgggatcgatctgggcggacgacttgcacttttggtccacgcgcaccttgctgccgccgagaatggccttggcggactccacgaccttggccgtcatcttgccctcctcccaccagatcaccatcttgtcgacgcaatcgttgaagggaaagttctcattggtccagttgacgcagccgaagggcgaattc

SEQ ID NO: 156 - protein, 728 aa, synthetic construct
  REGION 1..728: note = source = /note="Description of Artificial Sequence: Synthetic polypeptide"
MAADGYLPDWLEDNLSEGIREWWDLKPGAPKPKANQQKQDDGRGLVLPGYRYLGPFNGLDKGEPVNEADAAALEHDKAYDKQLEQGDNPYLKYNHADAEFQERLQEDTSFGGNLGRAVFQAKKRVLEPLGLVEEGAKTAPGKKRPIESPDSSTGIGKNGQPPAKKKLNFGQTGDSESVPDPQPLGEPPAAPSGLGSGTMAAGGGAPMADNNEGADGVGNASGNWHCDSTWLGDRVITTSTRTWALPTYNNHLYKQISSQSGATNDNHFFGYSTPWGYFDFNRFHCHFSPRDWQRLINNNWGFRPRKLRFKLFNIQVKEVTTNDGVTTIANNLTSTIQVFSDSEYQLPYVLGSAHQGCLPPFPADVFMIPQYGYLTLNNGSQSVGRSSFYCLEYFPSQMLRTGNNFEFSYTFEEVPFHSSYAHSQSLDRLMNPLIDQYLYYLARTQSTTGSTRELQFHQAGPNTMAEQSKNWLPGPCYRQQRLSKNIDSNNNSNFAWTGATKYHLNGRNSLTNPGVAMATNKDDEDQFFPINGVLVFGKTGAANKTTLENVLMTSEEEIKTTNPVATEEYGVVSSNLQSSTAGPQTQTVNSQGALPGMVWQNRDVYLQGPIWAKIPHTDGNFHPSPLMGGFGLKHPPPQILIKNTPVPANPPEVFTPAKFASFITQYSTGQVSVEIEWELQKENSKRWNPEIQYTSNYAKSNNVEFAVNNEGVYTEPRPIGTRYLTRNL

SEQ ID NO: 157 - protein, 728 aa, synthetic construct
  REGION 1..728: note = source = /note="Description of Artificial Sequence: Synthetic polypeptide"
MAADGYLPDWLEGNLSEGIREWWDLKPGAPKPKANQQKQDDGRGLVLPGYRYLGPFNGLDKGEPVNEADAAALEHDKAYDKQLEQGDNPYLKYNHADAEFQERLQEDTSFGGNLGRAVFQAKKRVLEPLGLVEEGAKTAPGKKRPIESPDSSTGIGKNGQPPAKKKLNFGQTGDSESVPDPQPLGEPPAAPSGLGSGTMAAGGGAPMADNNEGADGVGNASGNWHCDSTWLGDRVITTSTRTWALPTYNNHLYKQISSQSGATNDNHFFGYSTPWGYFDFNRFHCHFSPRDWQRLINNNWGFRPRKLRFKLFNIQVKEVTTNDGVTTIANNLTSTIQVFSDSEYQLPYVLGSAHQGCLPPFPADVFMIPQYGYLTLNNGSQSVGRSSFYCLEYFPSQMLRTGDNFEFSYTFEEVPFHSSYAHSQSLDRLMNPLIDQYLYYLARTQSTTGSTRELQFHQAGPNTMAEQSKNWLPGPCYRQQRLSKNIDSNNNSNFAWTGATKYHLNGRNSLTNPGVAMATNKDDEDQFFPINGVLVFGKTGAANKTTLENVLMTSEEEIKTTNPVATEEYGVVSSNLQSSTAGPQTQTVNSQGALPGMVWQNRDVYLQGPIWAKIPHTDGNFHPSPLMGGFGLKHPPPQILIKNTPVPANPPEVFTPAKFASFITQYSTGQVSVEIEWELQKENSKRWNPEIQYTSNYAKSNNVEFAVNNEGVYTEPRPIGTRYLTRNL

SEQ ID NO: 158 - DNA, 3106 bp, synthetic construct
  misc_feature 1..3106: note = source = /note="Description of Artificial Sequence: Synthetic polynucleotide"
  source 1..3106: mol_type = other DNA
gcggccgcgaattcgcccttcgcagagaccaaagttcaactgaaacgaatcagccggtttattgattaacaagtaattacaggttacgggtgaggtaacgggtgccaatggggcgaggctcagtataaaccccttcgttgttgacagcaaattccacattattagacttggcataatttgaggtgtactgaatctctggattccagcgtttgctgttttctttctgcagttcccactcgatctccacgctgacctggccggtgctgtactgcgtgataaatgaggcaaacttggcaggagtaaacacctctggaggattagcaggtaccggggtgtttttgatgagaatttgaggaggcgggtgtttgagtccaaatccgcccatcaggggagacgggtgaaagttgccgtccgtgtgaggaattttggcccagatgggaccctgcaggtacacgtcccggttctgccagaccatgccgggcagagccccctggctgttgacagtctgtgtctggggtccggccgtagacgattgcaggttgctggagaccacaccgtattcttctgtagccacgggattggtggttttgatctcctcctcgctggtcattagcacgttttccagcgttgtcttgttggcagcccccgttttgccaaaaaccagcactccgttgatgggaaagaactggtcctcgtcgtccttgttggtggccatggctacgcccgggttggttaatgaatttctaccattcagatggtatttagtggccccggtccaggcaaagttactgttgttgttgctgtctatgttttttgacagtctctgctgccgataacagggtccgggcagccagttctttgattgctcggccatggtgttgggcccagcctgatggaactgcagctcccttgtggaccccgtagtgctctgggtccgggccaggtagtacaggtactggtcgatgaggggattcatcagccggtccaggctctggctgtgcgcatagctgctgtggaaaggcacttcctcaaaggtgtagctgaattcaaagttatcgcccgttctcagcatctgagaaggaaagtactccaggcagtagaaggaggaacgtcccacagactgactgccgttgtttagagtcagatatccgtactgaggaatcatgaacacgtccgcagggaacggagggaggcagccctggtgcgcagagccgaggacgtacggcagttggtactccgagtccgagaagacctgaatcgtgctggtaaggttattagcgatggtcgtaacgccgtcgttcgtcgtgacctccttgacctggatgttgaacaacttgaaccgcagctttctgggccggaatccccagttgttgttgatgagtcgctgccagtcacgtggtgagaagtggcagtggaatctgttgaagtcaaaatagccccagggggtgctgtagccgaagaagtggttgtcgttggtagccccgctctgacttgatatctgcttgtagaggtggttgttgtaggtgggcagggcccaggtgcgggtgctggtggtgatgactctgtcgcccagccatgtggaatcgcaatgccaatttccggaggcattacccactccgtcggcgccttcgttattgtctgccattggtgcgccaccgcctgcagccattgtaccagatcccagacctgagggcgcggcgggaggttctccgagaggttgggggtcgggcactgactctgagtcgccagtctgcccaaagttgagcttctttttagcgggcggctggccgttcttgccgatgcccgtggaggagtcgggggattctatgggtctcttctttccaggagccgtcttagcgccttcctcaaccagaccgagaggttcgagaacccgcttcttggcctggaagactgctcgcccgaggttgcccccaaaagacgtatcttcttgaagacgctcctgaaactcggcgtcggcgtggttgtacttgaggtacgggttgtccccctgctcgagctgcttgtcgtaggccttgtcgtgctcgagggccgcggcgtctgcctcgttgaccggctctcccttgtcgagtccgttgaagggtccgaggtacctgtagccaggaagcaccagaccccggccgtcgtcctgcttttgctggttggctttgggtttcggggctccaggtttcaagtcccaccactcgcgaatgccctcagagaggttgccctcgagccaatctggaagataaccatcggcagccatacctggtttaagtcatttattgctcagaaacacagtcatccaggtccacgttggccagatcgcaggccgagcaagcaatctcgggagcccgccccagcagatgatgaatggcacagagtttccgatacgtcctctttctgacgaccggttgagattctgacacgccggggaaacattctgaacagtctctggtcccgtgcgtgaagcaaatgttgaaattctgattcattctctcgcatgtcttgcaggggaacagcatctgaagcatgcccgcgtgacgagaacatttgttttggtacctgtcggcaaagtccaccggagctccttccgcgtctgacgtcgatggatccgcgactgaggggcaggcccgcttgggctcgcttttatccgcgtcatcgggggcgggtctcttgttggctccaccctttctgacgtagaactcatacgccacctcggtcacgtgatcctgcgcccagcggaagaactctttgacttcctgctttgtcaccttgccaaagtcatgctccagacggcgggtgagttcaaatttgaacatccggtcttgtaacggctgctggtgctcgaaggtggtgctgttcccgtcaatcacggcgcacatgttggtgttggaagtgacgatcacgggggtgggatcgatctgggcggacgacttgcacttttggtccacgcgcaccttgctgccgccgagaatggccttggcggactccacgaccttggccgtcatcctgccctcctcccaccagatcaccatcttgtcgacgcaatcgttgaagggaaagttctcattggtccagttgacgcagccgtagaaagggcgaattc

SEQ ID NO: 159 - protein, 728 aa, synthetic construct
  REGION 1..728: note = source = /note="Description of Artificial Sequence: Synthetic polypeptide"
MAADGYLPDWLEDNLSEGIREWWDLKPGAPKPKANQQKQDDGRGLVLPGYKYLGPFNGLDKGEPVNEADAAALEHDKAYDKQLEQGDNPYLKYNHADAEFQERLQEDTSFGGNLGRAVFQAKKRVLEPLGLVEEGAKTAPGKKRPIESPDSSTGIGKKGQQPAKKKLNFGQTGDSESVPDPQPLGEPPAAPSGLGSGTMAAGGGAPMADNNEGADGVGNASGNWHCDSTWLGDRVITTSTRTWALPTYNNHLYKQISSQSGATNDNHFFGYSTPWGYFDFNRFHCHFSPRDWQRLINNNWGFRPRKLRFKLFNIQVKEVTTNDGVTTIANNLTSTIQVFSDSEYQLPYVLGSAHQGCLPPFPADVFMIPQYGYLTLNNGSQSMGRSSFYCLEYFPSQMLRTGNNFEFSYTFEEVPFHSSYAHSQSLDRLMNPLIDQYLYYLARTQSTTGSTRELQFHQAGPNTMAEQSKNWLPGPCYRQQRLSKNIDSNNNSNFAWTGATKYHLNGRNSLTNPGVAMATNKDDEGQFFPINGVLVFGKTGAANKTTLENVLMTSEEEIKTTNPVATEEYGVVSSNLQSSTAGPQTQTVNSQGALPGMVWQNRDVYLQGPIWAKIPHTDGNFHPSPLMGGFGLKHPPPQILIKNTPVPANPPGVFTPALFASFITQYSTGQVSVEIEWELQKENSKRWNPEIQYTSNYAKSNNVEFAVNNEGVYTEPRPIGTRYLTRNL

SEQ ID NO: 160 - DNA, 3098 bp, synthetic construct
  misc_feature 1..3098: note = source = /note="Description of Artificial Sequence: Synthetic polynucleotide"
  source 1..3098: mol_type = other DNA
gaattcgcccttcgcagagaccaaagttcaactgaaacgaatcaaccggtttattgattaacaagtaattacaggttacgggtgaggtaacgggtgccaatggggcgaggctcagtataaaccccttcgttgttgacagcaaattccacattattagacttggcataatttgaggtgtactgaatctctggattccagcgtttgctgttttctttctgcagttcccactcgatctccacgctgacctggccggtgctgtactgcgtgataaatgaggcaaactaggcaggagtaaacacccctggaggattagcaggtaccggggtgtttttgatgagaatttgaggaggcgggtgtttgagtccaaatccgcccatcaggggagacgggtgaaagttgccgtccgtgtgaggaattttggcccagatgggaccctgcaggtacacgtcccggttctgccagaccatgccgggcagagccccctggctgttgacagtctgtgtctggggtccggccgtagacgattgcaggttgctggagaccacaccgtattcttctgtagccacgggattggtggttttgatctcctcctcgctggtcattagcacgttttccagcgttgtcttgttggcagcccccgttttgccaaaaaccagcactccgttgatgggaaagaactggccctcgtcgtccttgttggtggccatggctacgcccgggttggttaatgaatttctaccattcagatggtatttagtggccccggtccaggcaaagttactgttgttgttgctgtctatgttttttgacagtctctgctgccgataacagggtccgggcagccagttctttgattgctcggccatggtgttgggcccagcctgatggaactgcagctcccttgtggaccccgtagtgctctgggtccgggccaggtagtacaggtactggtcgatgaggggattcatcagccggtccaggctctggctgtgcgcatagctgctgtggaaaggcacttcctcaaaggtgtagctgaattcaaagttattgcccgttctcagcatctgagaaggaaagtactccaggcagtagaaggaggaacgtcccatagactgactgccgttgtttagagtcagatatccgtactgaggaatcatgaacacgtccgcagggaacggagggaggcagccctggtgcgcagagccgaggacgtacggcagttggtactccgagtccgagaagacctgaatcgtgctggtaaggttattagcgatggtcgtaacgccgtcgttcgtcgtgacctccttgacctggatgttgaacaacttgaaccgcagctttctgggccggaatccccagttgttgttgatgagtcgctgccagtcacgtggtgagaagtggcagtggaatctgttgaagtcaaaatagccccagggggtgctgtagccgaagaagtggttgtcgttggtagccccgctctgacttgatatctgcttgtagaggtggttgttgtaggtgggcagggcccaggtgcgggtgctggtggtgatgactctgtcgcccagccatgtggaatcgcaatgccaatttccggaggcattacccactccgtcggcgccttcgttattgtctgccattggtgcgccaccgcctgcagccattgtaccagatcccagacctgagggcgcggcgggaggttctccgagaggttgggggtcgggcactgactctgagtcgccagtctgcccaaagttgagcttctttttagcgggctgctggcctttcttgccgatgcccgtggaggagtcgggggattctatgggtctcttctttccaggagccgtcttagcgccttcctcaaccagaccgagaggttcgagaacccgcttcttggcctggaagactgctcgcccgaggttgcccccaaaagacgtatcttcttgaagacgctcctgaaactcagcgtcggcgtggttgtacttgaggtacgggttgtccccctgctcgagctgcttgtcgtaggccttgtcgtgctcgagggccgcggcgtctgcctcgttgaccggctctcccttgtcgagtccgttgaagggtccgaggtacttgtagccaggaagcaccagaccccggccgtcgtcctgcttttgctggttggctttgggtttcggggctccaggtttcaagtcccaccactcgcgaatgccctcagagaggttgtcctcgagccaatctggaagataaccatcggcagccatacctggtttaagtcatttattgctcagaaacacagtcatccaggtccacgttgaccagatcgcaggccgagcaagcaatctcgggagcccgccccagcagatgatgaatggcacagagtttccgatacgtcctctttctgacgaccggttgagattctgacacgccggggaaacattctgaacagtctctggtcccgtgcgtgaagcaaatgttgaaattctgattcattctctcgcatgtcttgcagggaaacagcatctgaagcatgcccgcgtgacgagaacatttgttttggtacctgtcggcaaagtccaccggagctccttccgcgtctgacgtcgatggatccgcgactgaggggcaggcccgcttgggctcgcttttatccgcgtcatcgggggcgggcctcttgttggctccaccctttctgacgtagaactcatgcgccacctcggtcacgtgatcctgcgcccagcggaagaactctttgacttcctgctttgtcaccttgccaaagtcctgctccagacggcgggtgagttcaaatttgaacatccggtcttgtaacggctgctggtgctcgaaggtggtgctgttcccgtcaatcacggcgcacatgttggtgttggaagtgacgatcacgggggtgggatcgatctgggcggacgacttgcacttttggtccacgcgcaccttgctgccgccgagaatggccttggcggactccacgaccttggccgtcatcttgccctcctcccaccagatcaccatcttgtcgacgcaatcgttgaagggaaagttctcattggtccagttgacgcagccgtagaaagggcgaattc

SEQ ID NO: 161 - DNA, 2187 bp, synthetic construct
  misc_feature 1..2187: note = source = /note="Description of Artificial Sequence: Synthetic polynucleotide"
  source 1..2187: mol_type = other DNA
atggctgccgatggttatcttccagattggctcgagggcaacctctctgagggcattcgcgagtggtgggacttgaaacctggagccccgaaacccaaagccaaccagcaaaagcaggacgacggccggggtctggtgcttcctggctacaggtacctcggacccttcaacggactcgacaagggagagccggtcaacgaggcagacgccgcggccctcgagcacgacaaggcctacgacaagcagctcgagcagggggacaacccgtacctcaagtacaaccacgccgacgccgagtttcaggagcgtcttcaagaagatacgtcttttgggggcaacctcgggcgagcagtcttccaggccaagaagcgggttctcgaacctctcggtctggttgaggaaggcgctaagacggctcctggaaagaagagacccatagaatcccccgactcctccacgggcatcggcaagaacggccagccgcccgctaaaaagaagctcaactttgggcagactggcgactcagagtcagtgcccgacccccaacctctcggagaacctcccgccgcgccctcaggtctgggatctggtacaatggctgcaggcggtggcgcaccaatggcagacaataacgaaggcgccgacggagtgggtaatgcctccggaaattggcattgcgattccacatggctgggcgacagagtcatcaccaccagcacccgcacctgggccctgcccacctacaacaaccacctctacaagcagatatcaagtcagagcggggctaccaacgacaaccacttcttcggctacagcaccccctggggctattttgacttcaacagattccactgccacttctcaccacgtgactggcagcgactcatcaacaacaactggggattccggcccagaaagctgcggttcaagttgttcaacatccaggtcaaggaggtcacgacgaacgacggcgttacgaccatcgctaataaccttaccagcacgattcaggtcttctcggactcggagtaccaactgccgtacgtcctcggctctgcgcaccagggctgcctccctccgttccctgcggacgtgttcatgattcctcagtacggatatctgactctaaacaacggcagtcagtctgtgggacgttcctccttctactgcctggagtactttccttctcagatgctgagaacgggcgataactttgaattcagctacacctttgaggaagtgcctttccacagcagctatgcgcacagccagagcctggaccggctgatgaatcccctcatcgaccagtacctgtactacctggcccggacccagagcactacggggtccacaagggagctgcagttccatcaggctgggcccaacaccatggccgagcaatcaaagaactggctgcccggaccctgttatcggcagcagagactgtcaaaaaacatagacagcaacaacaacagtaactttgcctggaccggggccactaaataccatctgaatggtagaaattcattaaccaacccgggcgtagccatggccaccaacaaggacgacgaggaccagttctttcccatcaacggagtgctggtttttggcaaaacgggggctgccaacaagacaacgctggaaaacgtgctaatgaccagcgaggaggagatcaaaaccaccaatcccgtggctacagaagaatacggtgtggtctccagcaacctgcaatcgtctacggccggaccccagacacagactgtcaacagccagggggctctgcccggcatggtctggcagaaccgggacgtgtacctgcagggtcccatctgggccaaaattcctcacacggacggcaactttcacccgtctcccctgatgggcggatttggactcaaacacccgcctcctcaaattctcatcaaaaacaccccggtacctgctaatcctccagaggtgtttactcctgccaagtttgcctcatttatcacgcagtacagcaccggccaggtcagcgtggagatcgagtgggaactgcagaaagaaaacagcaaacgctggaatccagagattcagtacacctcaaattatgccaagtctaataatgtggaatttgctgtcaacaacgaaggggtttatactgagcctcgccccattggcacccgttacctcacccgtaacctgtaa

SEQ ID NO: 162 - protein, 728 aa, synthetic construct; identical to SEQ ID NO: 157
  REGION 1..728: note = source = /note="Description of Artificial Sequence: Synthetic polypeptide"

SEQ ID NO: 163 - protein, 728 aa, synthetic construct
  REGION 1..728: note = source = /note="Description of Artificial Sequence: Synthetic polypeptide"
MAADGYLPDWLEDNLSEGIREWWDLKPGAPKPKANQQKQDDGRGLVLPGYRYLGPFNGLDKGEPVNEADAAALEHDKAYDKQLEQGDNPYLKYNHADAEFQERLQEDTSFGGNLGRAVFQAKKRVLEPLGLVEEGAKTAPGKKRPIESPDSSTGIGKNGQPPAKKKLNFGQTGDSESVPDPQPLGEPPAAPSGLGSGTMAAGGGAPMADNNEGADGVGNASGNWHCDSTWLGDRVITTSTRTWALPTYNNHLYKQISSQSGATNDNHFFGYSTPWGYFDFNRFHCHFSPRDWQRLINNNWGFRPRKLRFKLFNIQVKEVTTNDGVTTIANNLTSTIQVFSDSEYQLPYVLGSAHQGCLPPFPADVFMIPQYGYLTLNNGSQSVGRSSFYCLEYFPSQMLRTGDNFEFSYTFEEVPFHSSYAHSQSLDRLMNPLIDQYLYYLARTQSTTGSTRELQFHQAGPNTMAEQSKNWLPGPCYRQQRLSKNIDSNNNSNFAWTGATKYHLNGRNSLTNPGVAMATNKDDEDQFFPINGVLVFGKTGAANKTTLENVLMTSEEEIKTTNPVATEEYGVVSSNLQSSTAGPQTQTVNSQGALPGMVWQNRDVYLQGPIWAKIPHTDGNFHPSPLMGGFGLKHPPPQILIKNTPVPANPPEVFTPAKFASFITQYSTGQVSVEIEWELQKENSKRWNPEIQYTSNYAKSNNVEFAVNNEGVYTEPRPIGTRYLTRNL

SEQ ID NO: 164 - protein, 728 aa, synthetic construct; identical to SEQ ID NO: 156
  REGION 1..728: note = source = /note="Description of Artificial Sequence: Synthetic polypeptide"

SEQ ID NO: 165 - protein, 728 aa, synthetic construct
  REGION 1..728: note = source = /note="Description of Artificial Sequence: Synthetic polypeptide"
MAADGYLPDWLEDNLSEGIREWWDLKPGAPKPKANQQKQDDGRGLVLPGYKYLGPFNGLDKGEPVNEADAAALEHDKAYDKQLEQGDNPYLKYNHADAEFQERLQEDTSFGGNLGRAVFQAKKRVLEPLGLVEEGAKTAPGKKRPIESPDSSTGIGKNGQPPAKKKLNFGQTGDSESVPDPQPLGEPPAAPSGLGSGTMAAGGGAPMADNNEGADGVGNASGNWHCDSTWLGDRVITTSTRTWALPTYNNHLYKQISSQSGATNDNHFFGYSTPWGYFDFNRFHCHFSPRDWQRLINNNWGFRPRKLRFKLFNIQVKEVTTNDGVTTIANNLTSTIQVFSDSEYQLPYVLGSAHQGCLPPFPADVFMIPQYGYLTLNNGSQSVGRSSFYCLEYFPSQMLRTGNNFEFSYTFEEVPFHSSYAHSQSLDRLMNPLIDQYLYYLARTQSTTGSTRELQFHQAGPNTMAEQSKNWLPGPCYRQQRLSKNIDSNNNSNFAWTGATKYHLNGRNSLTNPGVAMATNKDDEDQFFPINGVLVFGKTGAANKTTLENVLMTSEEEIKTTNPVATEEYGVVSSNLQSSTAGPQTQTVNSQGALPGMVWQNRDVYLQGPIWAKIPHTDGNFHPSPLMGGFGLKHPPPQILIKNTPVPANPPEVFTPAKFASFITQYSTGQVSVEIEWELQKENSKRWNPEIQYTSNYAKSNNVEFAVNNEGVYTEPRPIGTRYLTRNL

SEQ ID NO: 166 - protein, 728 aa, synthetic construct
  REGION 1..728: note = source = /note="Description of Artificial Sequence: Synthetic polypeptide"
MAADGYLPDWLEDNLSEGIREWWDLKPGAPKPKANQQKQDDGRGLVLPGYKYLGPFNGLDKGEPVNEADAAALEHDKAYDKQLEQGDNPYLKYNHADAEFQERLQEDTSFGGNLGRAVFQAKKRVLEPLGLVEEGAKTAPGKKRPIESPDSSTGIGKKGQQPAKKKLNFGQTGDSESVPDPQPLGEPPAAPSGLGSGTMAAGGGAPMADNNEGADGVGNASGNWHCDSTWLGDRVITTSTRTWALPTYNNHLYKQISSQSGATNDNHFFGYSTPWGYFDFNRFHCHFSPRDWQRLINNNWGFRPRKLRFKLFNIQVKEVTTNDGVTTIANNLTSTIQVFSDSEYQLPYVLGSAHQGCLPPFPADVFMIPQYGYLTLNNGSQSVGRSSFYCLEYFPSQMLRTGNNFEFSYTFEEVPFHSSYAHSQSLDRLMNPLIDQYLYYLARTQSTTGSTRELQFHQAGPNTMAEQSKNWLPGPCYRQQRLSKNIDSNNNSNFAWTGATKYHLNGRNSLTNPGVAMATNKDDEDQFFPINGVLVFGKTGAANKTTLENVLMTSEEEIKTTNPVATEEYGVVSSNLQSSTAGPQTQTVNSQGALPGMVWQNRDVYLQGPIWAKIPHTDGNFHPSPLMGGFGLKHPPPQILIKNTPVPANPPEVFTPAKFASFITQYSTGQVSVEIEWELQKENSKRWNPEIQYTSNYAKSNNVEFAVNNEGVYTEPRPIGTRYLTRNL

SEQ ID NO: 167 - DNA, 2215 bp, synthetic construct
  misc_feature 1..2215: note = source = /note="Description of Artificial Sequence: Synthetic polynucleotide"
  source 1..2215: mol_type = other DNA
atggctgccgatggttatcttccagattggctcgaggacactctctctgaaggaataagacagtggtggaagctcaaacctggcccaccaccaccaaagcccgcagagcggcataaggacgacagcaggggtcttgtgcttcctgggtacaagtacctcggacccttcaacggactcgacaagggagagccggtcaacgaggcagacgccgcggccctcgagcacgacaaagcctacgaccggcagctcgacagcggagacaacccgtacctcaagtacaaccacgccgacgccgagttccaggagcggctcaaagaagatacgtcttttgggggcaacctcgggcgagcagtcttccaggccaaaaagaggcttcttgaacctcttggtctggttgaggaagcggctaagacggctcctggaaagaagaggcctgtagagcactctcctgtggagccagactcctcctcgggaaccggaaaggcgggccagcagcctgcaagaaaaagattgaattttggtcagactggagacgcagactcagtcccagaccctcaaccaatcggagaacctcccgcagccccctcaggtgtgggatctcttacaatggctgcaggcggtggcgcaccaatggcagacaataacgagggcgccgacggagtgggtaattcctcgggaaattggcattgcgattccacatggatgggcgacagagtcatcaccaccagcacccgaacctgggccctgcccacctacaacaaccacctctacaagcaaatctccaacagcacatctggaggatcttcaaatgacaacgcctacttcggctacagcaccccctgggggtattttgactttaacagattccactgccacttttcaccacgtgactggcagcgactcatcaacaacaactggggattccggcccaagagactcagcttcaagctcttcaacatccaggtcaaggaggtcacgcagaatgaaggcaccaagaccatcgccaataacctcaccagcaccatccaggtgtttacggactcggagtaccagctgccgtacgttctcggctctgcccaccagggctgcctgcctccgttcccggcggacgtgttcatgattccccagtacggctacctaacactcaacaacggtagtcaggccgtgggacgctcctccttctactgcctggaatactttccttcgcagatgctgagaaccggcaacaacttccagtttacttacaccttcgaggacgtgcctttccacagcagctacgcccacagccagagcttggaccggctgatgaatcctctgattgaccagtacctgtactacttgtctcggactcaaacaacaggaggcacgacaaatacgcagactctgggcttcagccaaggtgggcctaatacaatggccaatcaggcaaagaactggctgccaggaccctgttaccgccagcagcgagtatcaaagacatctgcggataacaacaacagtgaatactcgtggactggagctaccaagtaccacctcaatggcagagactctctggtgaatccgggcccggccatggcaagccacaaggacgatgaagaaaagtttttttcctcagagcggggttctcatctttgggaagcaaggctcagagaaaacaaatgtggacattgaaaaggtcatgattacagacgaagaggaaatcaggacaaccaatcccgtggctacggagcagtatggttctgtatctaccaacctccagagaggcaacagacaagcagctaccgcagatgtcaacacacaaggcgttcttccaggcatggtctggcaggacagagatgtgtaccttcaggggcccatctgggcaaagattccacacacggacggacattttcacccctctcccctcatgggtggattcggacttaaacaccctccgcctcagatcctgatcaagaacacgcctgtacctgcggatcctccgaccaccttcaaccagtcaaagctgaactctttcatcacccagtattctactggccaagtcagcgtggagatcgagtgggagctgcagaaggaaaacagcaagcgctggaaccccgagatccagtacacctccaactactacaaatctacaagtgtggactttgctgttaatacagaaggcgtgtactctgaaccccgccccattggcacccgttacctcacccgtaatctgtaa

SEQ ID NO: 168 - protein, 737 aa, synthetic construct
  REGION 1..737: note = source = /note="Description of Artificial Sequence: Synthetic polypeptide"
MAADGYLPDWLEDTLSEGIRQWWKLKPGPPPPKPAERHKDDSRGLVLPGYKYLGPFNGLDKGEPVNEADAAALEHDKAYDRQLDSGDNPYLKYNHADAEFQERLKEDTSFGGNLGRAVFQAKKRLLEPLGLVEEAAKTAPGKKRPVEHSPVEPDSSSGTGKAGQQPARKRLNFGQTGDADSVPDPQPIGEPPAAPSGVGSLTMAAGGGAPMADNNEGADGVGNSSGNWHCDSTWMGDRVITTSTRTWALPTYNNHLYKQISNSTSGGSSNDNAYFGYSTPWGYFDFNRFHCHFSPRDWQRLINNNWGFRPKRLSFKLFNIQVKEVTQNEGTKTIANNLTSTIQVFTDSEYQLPYVLGSAHQGCLPPFPADVFMIPQYGYLTLNNGSQAVGRSSFYCLEYFPSQMLKTGNNFQFTYTFEDVPFHSSYAHSQSLDRLMNPLIDQYLYYLSRTQTTGGTTNTQTLGFSQGGPNTMANQAKNWLPGPCYRQQRVSKTSADNNNSEYSWTGATKYHLNGRDSLVNPGPAMASHKDDEEKFFPQSGVLIFGKQGSEKTNVDIEKVMITDEEEIRTTNPVATEQYGSVSTNLQRGNRQAATADVNTQGVLPGMVWQDRDVYLQGPIWAKIPHTDGHFHPSPLMGGFGLKHPPPQILIKNTPVPADPPTTFNQSKLNSFITQYSTGQVSVEIEWELQKENSKRWNPEIQYTSNYYKSTSVDFAVNTEGVYSEPRPIGTRYLTRNL

SEQ ID NO: 169 - protein, 737 aa, synthetic construct
  REGION 1..737: note = source = /note="Description of Artificial Sequence: Synthetic polypeptide"
MAADGYLPDWLEDTLSEGIRQWWKLKPGPPPPKPAERHKDDSRGLVLPGYKYLGPFNGLDKGEPVNEADAAALEHDKAYDRQLDSGDNPYLKYNHADAEFQERLKEDTSFGGNLGRAVFQAKKRLLEPLGLVEEAAKTAPGKKRPVEHSPVEPDSSSGTGKAGQQPARKRLNFGQTGDADSVPDPQPIGEPPAAPSGVGSLTMAAGGGAPMADNNEGADGVGNSSGNWHCDSTWMGDRVITTSTRTWALPTYNNHLYKQISNSTSGGSSNDNAYFGYSTPWGYFDFNRFHCHFSPRDWQRLINNNWGFRPKRLSFKLFNIQVKEVTQNEGTKTIANNLTSTIQVFTDSEYQLPYVLGSAHQGCLPPFPADVFMIPQYGYLTLNNGSQAVGRSSFYCLEYFPSQMLKTGNNFQFTYTFEDVPFHSSYAHSQSLDRLMNPLIDQYLYYLSRTQTTGGTTNTQTLGFSQGGPNTMANQAKNWLPGPCYRQQRVSKTSADNNNSEYSWTGATKYHLNGRDSLVNPGPAMASHKDDEEKFFPQSGVLIFGKQGSEKTNVDIEKVMITDEEEIRTTNPVATEQYGSVSTNLQQGNTQAATADVNTQGVLPGMVWQDRDVYLQGPIWAKIPHTDGHFHPSPLMGGFGLKHPPPQILIKNTPVPADPPTTFNQSKLNSFITQYSTGQVSVEIEWELQKENSKRWNPEIQYTSNYYKSTSVDFAVNTEGVYSEPRPIGTRYLTRNL

SEQ ID NO: 170 - protein, 737 aa, synthetic construct
  REGION 1..737: note = source = /note="Description of Artificial Sequence: Synthetic polypeptide"
MAADGYLPDWLEDTLSEGIRQWWKLKPGPPPPKPAERHKDDSRGLVLPGYKYLGPFNGLDKGEPVNEADAAALEHDKAYDRQLDSGDNPYLKYNHADAEFQERLKEDTSFGGNLGRAVFQAKKRLLEPLGLVEEAAKTAPGKKRPVEHSPVEPDSSSGTGKAGQQPARKRLNFGQTGDADSVPDPQPIGEPPAAPSGVGSLTMAAGGGAPMADNNEGADGVGNSSGNWHCDSTWMGDRVITTSTRTWALPTYNNHLYKQISNSTSGGSSNDNAYFGYSTPWGYFDFNRFHCHFSPRDWQRLINNNWGFRPKRLSFKLFNIQVKEVTQNEGTKTIANNLTSTIQVFTDSEYQLPYVLGSAHQGCLPPFPADVFMIPQYGYLTLNNGSQAVGRSSFYCLEYFPSQMLRTGNNFQFTYTFEDVPFHSSYAHSQSLDRLMNPLIDQYLYYLSRTQTTGGTTNTQTLGFSQGGPNTMANQAKNWLPGPCYRQQRVSKTSADNNNSEYSWTGATKYHLNGRDSLVNPGPAMASHKDDEEKFFPQSGVLIFGKQGSEKTNVDIEKVMITDEEEIRTTNPVATEQYGSVSTNLQQGNTQAATADVNTQGVLPGMVWQDRDVYLQGPIWAKIPHTDGHFHPSPLMGGFGLKHPPPQILIKNTPVPADPPTTFNQSKLNSFITQYSTGQVSVEIEWELQKENSKRWNPEIQYTSNYYKSTSVDFAVNTEGVYSEPRPIGTRYLTRNL

SEQ ID NO: 171 - protein, 729 aa, synthetic construct
  REGION 1..729: note = source = /note="Description of Artificial Sequence: Synthetic polypeptide"
MAADGYLPDWLEDNLSEGIREWWDLKPGAPKPKANQQKQDDGRGLVLPGYKYLGPFNGLDKGEPVNAADAAALEHDKAYDQQLKAGDNPYLRYNHADAEFQERLQEDTSFGGNLGRAVFQAKKRVLEPLGLVEEGAKTAPGKKRPIDSPDSSTGIGKKGQQPAKKKLNFGQTGDSESVPDPQPLGEPPAAPSSVGSGTMAAGGGAPTADNNEGADGVGNASGNWHCDSTWLGDRVITTSTRTWALPTYNNHLYKQISSSSSGATNDNHYFGYSTPWGYFDFNRFHCHFSPRDWQRLINNNWGFRPKKLRFKLFNIQVKEVTTNDGVTTIANNLTSTVQVFSDSEYQLPYVLGSAHQGCLPPFPADVFMIPQYGYLTLNNGSQSVGRSSFYCLEYFPSQMLRTGNNFEFSYSFEDVPFHSSYAHSQSLDRLMNPLIDQYLYYLARTQSTTGSTRELQFHQAGPNTMAEQSKNWLPGPCYRQQRLSKNLDFNNNSNFAWTAATKYHLNGRNSLTNPGIPMATNKDDEDQFFPINGVLVFGKTGAANKTTLENVLMTSEEEIKTTNPVATEEYGVVSSNLQSSTAGPQSQTINSQGALPGMVWQNRDVYLQGPIWAKIPHTDGNFHPSPLMGGFGLEHPPPQILIKNTPVPANPPEVFTPAKFASFITQYSTGQVSVEIEWELQKENSKRWNPEIQYTSNYAKSNNVEFAVNPDGVYTEPRPIGTRYLTRNL

SEQ ID NO: 172 - DNA, 3075 bp, synthetic construct
  misc_feature 1..3075: note = source = /note="Description of Artificial Sequence: Synthetic polynucleotide"
  source 1..3075: mol_type = other DNA
tgagaactttcctttcaacgattgcgtcggacaagatggtgatctggtgggaggaggggaagatgaccgccaaggtcgtggagtcggccaaagccattcttggaggaagcaaggtgcgtgtggaccagaaatgcaagtcctcggcccagatagacccgactcccgtgatcgtcacctccaacaccaacatgtgcgccgtgattgacgggaactcaacgaccttcgagcaccagcagccgttgcaagaccggatgttcaaatttgaacttacccgccgtctggatcatgactttggaaaggtcaccaagcaggaagtgaaagactttttccggtgggcaaaggatcacgtggttgaggtggagcatgaattctacgtcaaaaagggtggagctaagaaaagacccgcccccagtgacgcagatataagtgagcccaaacgggcgcgcgagtcagttgcgcagccatcaacgtcagacgcggaagcttcgatcaactacgcggacaggtaccaaaaacaaatgttctcgtcacgtgggcatgaatctgatgctgtttccctgcagacaatgcgagagaatgaatcagaattcaaatatctgcttcactcacggacagaaagactgtttagagtgctttcccgtgtcagaatctcaacccgtttctgtcgtcaaaaaggcgtatcagaaactgtgctacattcatcatatcatgggaaaggtgccagacgcttgcactgcctgcgatctggtcaatgtggatttggatgactgcatctctgaacaataaatgatttaaatcaggtatggctgccgatggttatcctccagattggctcgaggacactctctctgaagggataagacagtggtggaagctcaaacctggcccaccaccaccaaagcccgcagagcggcataaggacgacagcaggggtcttgtgcttcctgggtacaagtacctcggacccttcaacggactcgacaagggggagccggtcaacgaggcagacgccgcggccctcgagcacgacaaggcctacgaccggcagctcgacagcggagacaacccgtacctcaagtacaaccacgccgacgcagagtttcaggagcgccttaaagaagatacgtcttttgggggcaacctcggacgagcagtcttccaggcgaaaaagagggttcttgaacctctgggcctggttgaggaacctgttaagacggctccgggaaaaaagaggccggtagagcactctcctgtggagccagactcctcctcgggaaccggaaaagcgggccagcggcctgcaagaaaaagattaaattttggtcagactggagacgcagactccgtacctgacccccagcctctcggacagccaccagcagccccctctggtctgggatctactacaatggctacaggcagtggcgcaccaatggcagacaataacgagggtgccgatggagtgggtaattcctcaggaaattggcattgcgattcccaatggctgggcgacagagtcatcaccaccagcacccgaacctgggccctgcccacatacaacaaccacctctacaagcaaatctccagccaatcaggagccagcaacgacaaccactactttggctacagcaccccctgggggtattttgacttcaacagattccactgccacttttcaccacgtgactggcaaagactcatcaacaacaactggggattccggcccaaaagactcaacttcaagctctttaatattcaagtcaaagaggtcacgcagaatgacggtacgacgacgattgccaataaccttaccagcacggttcaggtgtttactgactcggagtaccagctcccgtacgtcctgggctcggcgcatcaaggatgcctcccgccgtttccagcggacgtcttcatggtcccacagtatggatacctcaccctgaacaacgggagtcaggcggtaggacgctcttccttttactgcctggagtactttccttctcagatgctgcgtactggaaacaactttcagttcagctacacttttgaagacgtgcctttccacagcagctacgctcacagccagagtctggatcggctgatgaatcctctgatcgaccagtacctgtattatctgaacaagacacaaacaaatagtggaactcttcagcagtctcggctactgtttagccaagctggaccaaccaacatgtctcttcaagctaaaaactggctgcctggaccttgctacagacagcagcgtctgtcaaaacaggcaaacgacaacaacaacagcaactttccctggactgcagctacaaagtatcatctaaatggccgggactcgttggttaatccaggaccagctatggccagtcacaaggatgacgaagaaaagtttttccccatgcatggaaccctgatatttggtaaacaaggaacaaatgccaacgacgcggatttggaaaatgtcatgattacagatgaagaagaaatcagggccaccaatcccgtggctacggagcagtacgggactgtgtcaaataatttgcaaaactcaaacactggtccaactactggaactgtcaatcgccaaggagcgttacctggtatggtgtggcaggatcgagacgtgtacctgcagggacccatttgggccaagattcctcacaccgatggacactttcatccttctccactgatgggaggttttggactcaaacacccgcctcctcagatcatgatcaaaaacactcccgttccagccaatcctcccacaaacttcagttctgccaagtttgcttctttcatcacacagtattccacgggacaggtcagcgtggagatcgagtgggagctgcagaaggagaacagcaaacgctggaatcccgaaattcagtacacttccaactacaacaagtctgttaatgtggactttactgtggacactaatggtgtgtattcagagcctcgccccattggcaccagatacctgactcgtaatctgtaattgcttgttaatcaataaaccgtttaattcgtttcagttgaactttggtctctgcgaagggcgaa

SEQ ID NO: 173 - DNA, 3142 bp, synthetic construct
  misc_feature 1..3142: note = source = /note="Description of Artificial Sequence: Synthetic polynucleotide"
  source 1..3142: mol_type = other DNA
aaaacgacgggccagtgattgtaatacgactcactatagggcgaaattgaaattagcggccgcgaattcgcctttcgcagagaccaaagttcaactgaaacgaattaaacggtttattgattaacaagcaattacagattacgagtcaggtatctggtgccaatggggcgaggctctgaatacacaccattagtgtccacagtaaagtccacattaacagacttgttgtagttggaagtgtactgaatttcgggattccagcgtttgctgttctccttctgcagctcccactcgatctccacgctgacctgtcccgtggaatactgtgtgatgaaagaagcaaacttggcagaactgaagtttgtgggaggattggctggaacgggagtgtttttgatcatgatctgaggaggcgggtgtttgagtccaaaacctcccatcagtggagaaggatgaaagtgtccatcggtgtgaggaatcttggcccaaatgggtccctgcaggtacacgtctcgatcctgccacaccataccaggtaacgctccttggtgattgacagttccagtagttggaccagtgtttgagttttgcaaattatttgacacagtcccgtactgctccgtagccacgggattggtggccctgatttcttcttcatctgtaatcatgacattttccaaatccgcgtcgttggcatttgttccttgtttaccaaatatcagggttccatgcatggggaaaaacttttcttcgtcatccttgtgactggccatagctggtcctggattaaccaacgagtcccggccatttagatgatactttgtagctgcagtccagggaaagttgctgttgttgttgtcgtttgcctgttttgacagacgctgctgtctgtagcaaggtccaggcagccagtttttagcttgaagagacatgttggttggtccagcttggctaaacagtagccgagactgctgaagagttccactatttgtttgtgtcttgttcagataatacaggtactggtcgatcagaggattcatcagccgatccagactctggctgtgagcgtagctgctgtggaaaggcacgtcttcaaaagtgtagctgaactgaaagttgtttccagtacgcagcatctgagaaggaaagtactccaggcagtaaaaggaagagcgtcctaccgcctgactcccgttgttcagggtgaggtatccatactgtgggaccatgaagacgtccgctggaaacggcgggaggcatccttgatgcgccgagcccaggacgtacgggagctggtactccgagtcagtaaacacctgaaccgtgctggtaaggttattggcaatcgtcgtcgtaccgtcattctgcgtgacctctttgacttgaatattaaagagcttgaagttgagtcttttgggccggaatccccggttgttgttgacgagtctttgccagtcacgtggtgaaaagtggcagtggaatctgttgaagtcaaaatacccccagggggtgctgtagccaaagtagtggttgtcgttgctggctcctgattggctggagatttgcttgtagaggtggttgttgtatgtgggcagggcccaggttcgggtgctggtggtgatgactctgtcgcccagccattgggaatcgcaatgccaatttcctgaggaattacccactccatcggcaccctcgttattgtctgccattggtgcgccactgcctgtagccattgtagtagatcccagaccagagggggctgctggtggctgtccgagaggctgggggtcaggtacggagtctgcgtctccagtctgaccaaaatttaatctttttcttgcaggctgctggcccgcttttccggttcccgaggaggagtctggctccacaggagagtgctctaccggcctcttttttcccggagccgtcttaacaggctcctcaaccaggcccagaggttcaagaaccctctttttcgcctggaagactgctcgtccgaggttgcccccaaaagacgtatcttctttaaggcgctcctgaaactctgcgtcggcgtggttgtacttgaggtacgggttgtctccgctgtcgagctgccggtcgtaggccttgtcgtgctcgagggccgcggcgtctgcctcgttgaccggctcccccttgtcgagtccgttgaagggtccgaggtacttgtacccaggaagcacaagacccctgctgtcgtccttatgccgctctgcgggctttggtggtggtgggccaggtttgagcttccaccactgtcttattccttcagagagagtgtcctcgagccaatctggaagataaccatcggcagccatacctgatttaaatcatttattgttcagagatgcagtcatccaaatccacattgaccagatcgcaggcagtgcaagcgtctggcacctttcccatgatatgatgaatgtagcacagtttctgatacgcctttttgacgacagaaacgggttgagattctgacacgggaaagcactctaaacagtctttctgtccgtgagtgaagcagatatttgaattctgattcattctctcgcattgtctgcagggaaacagcatcagattcatgcccacgtgacgagaacatttgttttggtacctgtccgcgtagttgatcgaagcttccgcgtctgacgtcgatggctgcgcaactgactcgcgcgcccgtttgggctcacttatatctgcgtcactgggggcgggtcttttcttagctccaccctttttgacgtagaattcatgctccacctcaaccacgtgatcctttgcccaccggaaaaagtctttcacttcctgcttggtgacctttccaaagtcatgatccagacggcgggtaagttcaaatttgaacatccggtcttgcaacggctgctggtgctcgaaggtcgttgagttcccgtcaatcacggcgcacatgttggtgttggaggtgacgatcacgggagtcgggtctatctgggccgaggacttgcatttctggtccacacgcaccttgcttcctccaagaatggctttggccgactccacgaccttggcggtcatcttcccctcctcccaccagatcaccatcttgtcgacgcaatggtaaaaggaaagttctcattgg

SEQ ID NO: 174 - protein, 735 aa, Adeno-associated virus 2
MAADGYLPDWLEDTLSEGIRQWWKLKPGPPPPKPAERHKDDSRGLVLPGYKYLGPFNGLDKGEPVNEADAAALEHDKAYDRQLDSGDNPYLKYNHADAEFQERLKEDTSFGGNLGRAVFQAKKRVLEPLGLVEEPVKTAPGKKRPVEHSPVEPDSSSGTGKAGQQPARKRLNFGQTGDADSVPDPQPLGEPPATPAAVGPTTMASGGGAPMADNNEGADGVGNASGNWHCDSTWLGDRVITTSTRTWALPTYNNHLYKQISSASTGASNDNHYFGYSTPWGYFDFNRFHCHFSPRDWQRLINNNWGFRPKRLNFKLFNIQVKEVTQNDGTTTIANNLTSTVQVFTDSEYQLPYVLGSAHQGCLPPFPADVFMIPQYGYLTLNNGSQAVGRSSFYCLEYFPSQMLRTGNNFTFSYTFEDVPFHSSYAHSQSLDRLMNPLIDQYLYYLNRTQNQSGSAQDKALLFSRGSPAGMSVQPKNWLPGPCYRQQRVSKTKTDNNNSNFTWTGASKYNLNGRESIINPGTAMASHKDDKDKFFPMSGVMIFGKESAGASNTALDNVMITDEEEIKATNPVATERFGTVAVNFQSSSTDPATGDVHVMGALPGMVWQDRDVYLQGPIWAKIPHTDGHFHPSPLMGGFGLKHPPPQILIKNTPVPANPPAEFSATKFASFITQYSTGQVSVEIEWELQKENSKRWNPEVQYTSNYAKSANVDFTVDNNGLYTEPRPIGTRYLTRP

SEQ ID NO: 175 - protein, 740 aa, Adeno-associated virus 2
MAADGYLPDWLEDTLSEGIRQWWKLKPGPPPPKPAERHKDDSRGLVLPGYKYLGPFNGLDKGEPVNAADAAALEHDKAYDRQLDSGDNPYLKYNHADAEFQERLKEDTSFGGNLGRAVFQAKKRVLEPLGLVEEPVKTAPGKKRPVEHSPVEPDSSSGTGKAGQQPARKRLNFGQTGDADSVPDPQPLGQPPAAPSGLGTNTMATGSGAPMADNNEGADGVGNSSGNWHCDSTWMGDRVITTSTRTWALPTYNNHLYKQISSQSGASNDNHYFGYSTPWGYFDFNRFHCHFSPRDWQRLINNNWGFRPKRLNFKLFNIQVKEVTQNDGTTTIANNLTSTVQVFTDSEYQLPYVLGSAHQGCLPPFPADVFMVPQYGYLTLNNGSQAVGRSSFYCLEYFPSQMLRTGNNFTFSYTFEDVPFHSSYAHSQSLDRLMNPLIDQYLYYLSRTNTPSGTTTQSGLQFSQAGASDIRDQSRNWLPGPCYRQQRVSKTSADNNNSEYSWTGATKYHLNGRDSLVNPGPAMASHKDDEEKFFPQSGVLIFGKQGSEKTNVDIEKVMITDEEEIRTTNPVATEQYGSVSTNLQRGNRQAATADVNTQGVLPGMVWQDRDVYLQGPIWAKIPHTDGHFHPSPLMGGFGLKHPPPQILIKNTPVPANPSTTFSAAKFASFITQYSTGQVSVEIEWELQKENSKRWNPEIQYTSNYNKSVNVDFTVDTNGVYSEPRPIGTRYLTRNLLLAAA

SEQ ID NO: 176 - protein, 734 aa, Adeno-associated virus 2
MAADGYLPDWLEDTLSEGIRQWWKLKPGPPPPKPAERHKDDSRGLVLPGYKYLGPFNGLDKGEPVNEADAAALEHDKAYDRQLDSGDNPYLKYNHADAEFQERLKEDTSFGGNLGRAVFQAKKRVLEPLGLVEEPVKTAPGKKRPVEHSPVEPDSSSGTGKAGQQPARKRLNFGQTGDADSVPDPQPLGQPPAAPSGLGTNTMATGSGAPMADNNEGADGVGNSSGNWHCDSTWMGDRVITTSTRTWALPTYNNHLYKQISSQSGASNDNHYFGYSTPWGYFDFNRFHCHFSPRDWQRLINNNWGFRPKRLNFKLFNIQVKEVTQNDGTTTIANNLTSTVQVFTDSEYQLPYVLGSAHQGCLPPFPADVFMVPQYGYLTLNNGSQAVGRSSFYCLEYFPSQMLRTGNNFTFSYTFEDVPFHSSYAHSQSLDRLMNPLIDQYLYYLSRTNTPSGTTTQSGLQFSQAGASDIRDQSRNWLPGPCYRQQRVSKTSADNNNSEYSWTGATMYHLNGRDSLVNPGPAMASHKDDEEKFFPQSGVLIFGKQGSEKTNVDIEKVMITDEEEIRTTNPVATEQYGSVSTNLQRGNRQAATADVNTQGVLPGMVWQDRDVYLQGPIWAKIPHTDGHFHPSPLMGGFGLKHPPPQILIKNTPVPANPSTTFSAAKFASFITQYSTGQVSVEIEWELQKENSKRWNPEIQYTSNYNKSINVDFTVDTNGVYSEPRPIGTRYLTRN

SEQ ID NO: 177 - protein, 734 aa, Adeno-associated virus 2
MAADGYLPDWLEDTLSEGIRQWWKLKPGPPPPKPAERHKDDSRGLVLPGYKYLGPFNGLDKGEPVNEADAAALEHDKAYDRQLDSGDNPYLKYNHADAEFQERLKEDTSFGGNLGRAVFQAKKRVLEPLGLVEEPVKTAPGKKRPVEHSPVEPDSSSGTGKAGQQPARKRLNFGQTGDADSVPDPQPLGQPPAAPSGLGTNTMATGSGAPMADNNEGADGVGNSSGNWHCDSTWMGDRVITTSTRTWALPTYNNHLYKQISSQSGASNDNHYFGYSTPWGYFDFNRFHCHFSPRDWQRLINNNWGFRPKRLNFKLFNIQVKEVTQNDGTTTIANNLTSTVQVFTDSEYQLPYVLGSAHQGCLPPFPADVFMVPQYGYLTLNNGSQAVGRSSFYCLEYFPSQMLRTGNNFTFSYTFEDVPFHSSYAHSQSLDRLMNPLIDQYLYYLSRTNTPSGTTTQSGLQFSQAGASDIRDQSRNWLPGPCYRQQRVSKTSADNNNSEYSWTGATKYHLNGRDSLVNPGPAMASHKDDEEKFFPQSGVLIFGKQGSEKTNVDIEKVMITDEEEIRTTNPVATEQYGSVSTNLQRGNRQAATADVNTQGVLPGMVWQDRDVYLQGPIWAKIPHTDGHFHPSPLMGGFGLKHPPPQILIKNTPVPANPSTTFSEAKFASFITQYSTGQVSVEIEWELQKENSKRWNPEIQYTSNYNKSVNVDFTVDTNGVYSEPRPIGTRYLTRN

SEQ ID NO: 178 - protein, 739 aa, Adeno-associated virus 2
MAADGYLPDWLEDTLSEGIRQWWKLKPGPPPPKPAERHKDDSRGLVLPGYKYLGPFNGLDKGEPVNEADAAALEHDKAYDRQLDSGDNPYLKYNHADAEFQERLKEDTSFGGNLGRAVFQAKKRVLEPLGLVEEPVKTAPGKKRPVEHSPVEPDSSSGTGKAGQQPARKRLNFGQTGDADSVPDPQPLGQPPAAPSGLGTNTMATGSGAPMADNNEGADGVGNSSGNWHCDSTWMGDRVITTSTRTWALPTYNNHLYKQISSQSGASNDNHYFGYSTPWGYFDFNRFHCHFSPRDWQRLINNNWGFRPKRLNFKLFNIQVKEVTQNDGTTTIANNLTSTVQVFTDSEYQLPYVLGSAHQGCLPPFPADVFMVPQYGYLTLNNGSQAVGRSSFYCLEYFPSQMLRTGNNFTFSYTFEDVPFHSSYAHSQSLDRLMNPLIDQYLYYLSRTNTPSGTTTQSGLQFSQAGASDIRDQSRNWLPGPCYRQQRVSKTSADNNNSEYSWTGATKYHLNGRDSLVNPGPAMASHKDDEEKFFPQSGVLIFGKQGSEKTNVDIEKVMITDEEEIRTTNPVATEQYGSVSTNLQRGNRQAATADVNTQGVLPGMVWQDRDVYLQGPIWAKIPHTDGHFHPSPLMGGFGLKHPPPQILIKNTPVPANPSTTFSAAKFASFITQYSTGQVSVEIEWELQKENSKRWNPEIQYTSNYNKSVNVDFTVDTNGVYSEPRPIGTRYLTRNLLLAA

SEQ ID NO: 179 - protein, 725 aa, Adeno-associated virus 2
MAADGYLPDWLEDTLSEGIRQWWKLKPGPPPPKPAERHKDDSRGLVLPGYKYLGPFNGLDKGEPVNEADAAALEHDKAYDRQLDSGDNPYLKYNHADAEFQERLKEDTSFGGNLGRAVFQAKKRVLEPLGLVEEPVKTAPGKKRPVEHSPVEPDSSSGTGKAGQQPARKRLNFGQTGDADSVPDPQPLGQPPAAPSGLGTNTMATGSGAPMADNNEGADGVGNSSGNWHCDSTWMGDRVITTSTRTWALPTYNNHLYKQISSQSGASNDNHYFGYSTPWGYFDFNRFHCHFSPRDWQRLINNNWGFRPKRLNFKLFNIQVKEVTQNDGTTTIANNLTSTVQVFTDSEYQLPYVLGSAHQGCLPPFPADVFMVPQYGYLTLNNGSQAVGRSSFYCLEYFPSQMLRTGNNFTFSYTFEDVPFHSSYAHSQSLDRLMNPLIDQYLYYLSRTNTPSGTTTQSGLQFSQAGASDIRDQSRNWLPGPCYRQQRVSKTSADNNNSEYSWTGATKYHLNGRDSLVNPGPAMASHKDDEEKFFPQSGVLIFGKQGSEKTNVDIEKVMITDEEEIRTTNPVATEQYGSVSTNLQRGNRQAATADVNTQGVLPGMVWQDRDVYLQGPIWAKIPHTDGHFHPSPLMGGFGLKHPPPQILIKNTPVPANPSTTFSAAKFASFITQYSTGQVSVEIEWELQKENSKRWNPEIQYTSNYNKSVNVDFTVDTNGVYSEPRP

SEQ ID NO: 180 - protein, 707 aa, Adeno-associated virus 2
MAADGYLPDWLEDTLSEGIRQWWKLKPGPPPPKPAERHKDDSRGLVLPGYKYLGPFNGLDKGEPVNEADAAALEHDKAYDRQLDSGDNPYLKYNHADAEFQERLKEDTSFGGNLGRAVFQAKKRVLEPLGLVEEPVKTAPGKKRPVEHSPVEPDSSSGTGKAGQQPARKRLNFGQTGDADSVPDPQPLGQPPAAPSGLGTNTMATGSGAPMADNNEGADGVGNSSGNWHCDSTWMGDRVITTSTRTWALPTYNNHLYKQISSQSGASNDNHYFGYSTPWGYFDFNRFHCHFSPRDWQRLINNNWGFRPKRLNFKLFNIQVKEVTQNDGTTTIANNLTSTVQVFTDSEYQLPYVLGSAHQGCLPPFPADVFMVPQYGYLTLNNGSQAVGRSSFYCLEYFPSQMLRTGNNFTFSYTFEDVPFHSSYAHSQSLDRLMNPLIDQYLYYLSRTNTPSGTTTQSGLQFSQAGASDIRDQSRNWLPGPCYRQQRVSKTSADNNNSEYSWTGATKYHLNGRDSLVNPGPAMASHKDDEEKFFPQSGVLIFGKQGSEKTNVDIEKVMITDEEEIRTTNPVATEQYGSCIYQPPERQQTSSYRRCQHTRRSSRHGLAGQRCVPSGAHLGKDSTHGRTFSPLSPHGWIRTTPSSTDSHQEHPGTCESFDHLQCGKVCFLHHTVLHGTGQRGDRVRAAEGKQQTLESRNSVHFQLQQVC

SEQ ID NO: 181 - protein, 739 aa, Adeno-associated virus 2; identical to SEQ ID NO: 178

SEQ ID NO: 182 - protein, 737 aa, Adeno-associated virus 2
MASDGYLPDWLEDNLSEGIREWWDLKPGAPKPKANQQKQDDGRGLVLPGYKYLGPFNGLDKGEPVNAADAAALEHDKAYDQQLKAGDNPYLRYNHADAEFQERLQEDTSFGGNLGRAVFQAKKRVLEPFGLVEEGAKTAPGKKRPVEQSPQEPDSSSGIGKTGQQPAKKRLNFGQTGDSESVPDPQPLGEPPATPAAVGPTTMASGGGAPMADNNEGADGVGNASGNWHCDSTWLGDRVITTSTRTWALPTYNNHLYKQISSASTGASNDNHYFGYSTPWGYFDFNRFHCHFSPRDWQRLINNNWGFRPKRLNFKLFNIQVKEVTTNDGTTTIANNLTSTVQVFTDSEYQLPYVLGSAHQGCLPPFPADVFMVPQYGYLTLNNGSQAVGRSSFYCLEYFPSQMLRTGNNFTFSYTFEDVPFHSSYAHSQSLDRLMNPLIDQYLYYLSRTNTPSGTTTQSGLQFSQAGASDIRDQSRNWLPGPCYRQQRVSKTSADNNNSEYSWTGATKYHLNGRDSLVNPGPAMASHKDDEEKFFPQSGVLIFGKQGSEKTNVDIEKVMITDEEEIRTTNPVATEQYGSVSTNLQRGNRQAATADVNTQGVLPGMVWQDRDVYLQGPIWAKIPHTDGHFHPSPLMGGFGLKHHPPQILIKNTPVPANPSTTFSAAKFASFITQYSTGQVSVEIEWELQKENSKRWNPEIQYTSNYNKSVNVDFTVDTNGVYSEPRPIGTRYLTRNLL

SEQ ID NO: 183 - protein, 741 aa, Adeno-associated virus 2
MAADGYLPDWLEDTLSEGIREWWALKPGAPKPKANQQKQDDGRGLVLPGYKYLGPFNGLDKGEPVNEADAAALEHDKAYDQQLQAGDNPYLRYNHADAEFQERLQEDTSFGGNLGRAVFQAKKRVLEPLGLVEEPVKTAPGKKRPVEHSPVEPDSSSGTGKSGQQPARKRLNFGQTGDADSVPDPQPLGQPPAAPSGLGTNTMATGSGAPMADNNEGADGVGNSSGNWHCDSTWMGDRVITTSTRTWALPTYNNHLYKQISSQSGASNDNHYFGYSTPWGYFDFNRFHCHFSPRDWQRLINNNWGFRPKRLNFKLFNIQVKEVTQNDGTTTIANNLTSTVQVFTDSEYQLPYVLGSAHQGCLPPFPADVFMVPQYGYLTLNNGSQAVGRSSFYCLEYFPSQMLRTGNNFTFSYTFEDVPFHSSYAHSQSLDRLMNPLIDQYLYYLSRTNTPSGTTTQSGLQFSQAGASDIRDQSRNWLPGPCYRQQRVSKTSADNNNSEYSWTGATKYHLNGRDSLVNPGPAMASHKDDEEKFFPQSGVLIFGKQGSEKTNVDIEKVMITDEEEIRTTNPVATEQYGSVSTNLQRGNLANHNNTTNARQAATADVNTQGVLPGMVWQDRDVYLQGPIWAKIPHTDGHFHPSPLMGGFGLKHPPPQILIKNTPVPANPSTTFSAAKFASFITQYSTGQVSVEIEWELQKENSKRWNPEIQYTSNYNKSINVDFTVDTNGVYSEPRPIGTRYL

SEQ ID NO: 184 - protein, 730 aa, Adeno-associated virus 2
MASDGYLPDWLEDNLSEGIREWWDLKPGAPKPKANQQKQDDGRGLVLPGYKYLGPFNGLDKGEPVNAADAAALEHDKAYDQQLKAGDNPYLRYNHADAEFQERLQEDTSFGGNLGRAVFQAKKRVLEPFGLVEEGAKTAPGKKRPVEQSPQEPDSSSGIGKTGQQPAKKRLNFGQTGDSESVPDPQPLGEPPATPAAVGPTTMASGGGAPMADNNEGADGVGNASGNWHCDSTWLGDRVITTSTRTWALPTYNNHLYKQISSASTGASNDNHYFGYSTPWGYFDFNRFHCHFSPRDWQRLINNNWGFRPKRLNFKLFNIQVKEVTTNDGVTTIANNLTSTVQVFSDSEYQLPYVLGSAHQGCLPPFPADVFMIPQYGYLTLNNGSQAVGRSSFYCLEYFPSQMLRTGNNFTFSYTFEDVPFHSSYAHSQSLDRLMNPLIDQYLYYLNRTQNQSGSAQNNDLLFSRGSPAGMSVQPKNWLPGPCYRQQRVSKTKTDNNNSNFTWTGASKYNLNGRESIINPGTAMASHKDDKDKFFPMSGVMIFGKESAGASNTALDNVMITDEEEIKATNPVATERFGTVAVNLQSSSTDPATGDVHVMGALPGMVWQDRDVYLQGPIWAKIPHTDGHFHPSPLMGGFGLKNPPPQILIKNTPVPANPPAEFSATKFASFITQYSTGQVSVEIEWELQKENSKRWNPEVQYTSNYAKSANVDFTVDNNGLYTEPRPIGTR

SEQ ID NO: 185 - protein, 735 aa, Adeno-associated virus 2
  VARIANT 239: note = MOD_RES - Any amino acid
MASDGYLPDWLEDNLSEGIREWWDLKPGAPKPKANQQKQDDGRGLVLPGYKYLGPFNGLDKGEPVNAADAAALEHDKAYDQQLKAGDNPYLRYNHADAEFQERLQEDTSFGGNLGRAVFQAKKRVLEPFGLVEEGAKTAPGKKRPVEQSPQEPDSSSGIGKTGQQPAKKRLNFGQTGDSESVPDPQPLGEPPATPAAVGPTTMASGGGAPMADNNEGADGVGNASGNWHCDSTWLGDRXITTSTRTWALPTYNNHLYKQISSASTGASNDNHYFGYSTPWGYFDFNRFHCHFSPRDWQRLINNNWGFRPKRLNFKLFNIQVKEVTTNDGVTTIANNLTSTVQVFSDSEYQLPYVLGSAHQGCLPPFPADVFMIPQYGYLTLNNGSQAVGRSSFYCLEYFPSQMLRTGNNFTFSYTFEDVPFHSSYAHSQSLDRLMNPLIDQYLYYLNRTQNQSGSAQNNDLLFSRGSPAGMSVQPKNWLPGPCYRQQRVSKTKTDNNNSNFTWTGASKYNLNGRESIINPGTAMASHKDDKDKFFPMSGVMIFGKESAGASNTALDNVMITDEEEIKATNPVATERFGTVAVNLQSSSTDPATGDVHVMGALPGMVWQDRDVYLQGPIWAKIPHTDGHFHPSPLMGGFGLKNPPPQILIKNTPVPANPPAEFSATKFASFITQYSTGQVSVEIEWELQKENSKRWNPEVQYTSNYAKSANVDFTVDNNGLYTEPRPIGTRYLTRP

SEQ ID NO: 186 - protein, 733 aa, Adeno-associated virus 2
MASDGYLPDWLEDNLSEGIREWWDLKPGAPKPKANQQKQDDGRGLVLPGYKYLGPFNGLDKGEPVNAADAAALEHDKAYDQQLKAGDNPYLRYNHADAEFQERLQEDTSFGGNLGRAVFLAKKRVLEPFGLVEEGAKTAPGKKRPVEQSPQEPDSSSGIGKTGQQPAKKRLNFGQTGDSESVPDPQPLGEPPATPAAVGPTTMASGGGAPMADNNEGADGVGNASGNWHCDSTWLGDRVITTSTRTWALPTYNNHLYKQISSASTGASNDNHYFGYSTPWGYFDFNRFHCHFSPRDWQRLINNNWGFRPKRLNFKLFNIQVKEVTTNDGVTTIANNLTSTVQVFSDSEYQLPYVLGSAHQGCLPPFPADVFMIPQYGYLTLNNGSQAVGRSSFYCLEYFPSQMLRTGNNFTFSYTFEDVPFHSSYAHSQSLDRLMNPLIDQYLYYLNRTQNQSGSAQNNDLLFSRGSPAGMSVQPKNWLPGPCYRQQRVSKTKTDNNNSNFTWTGASKYNLNGRESIINPGTAMASHKDDKDKFFPMSGVMIFGKESAGASNTALDNVMITDEEEIKATNPVATERFGTVAVNLQSSSTDPATGDVHVMGALPGMVWQDRDVYLQGPIWAKIPHTDGHFHPSPLMGGFGLKNPPPQILIKNTPVPANPPAEFSATKFASFITQYSTGQVSVEIEWELQKENSKRWNPEVQYTSNYAKSANVDFTVDNNGLYTEPRPIGTRYLT

SEQ ID NO: 187 - protein, 734 aa, Adeno-associated virus 2
MAADGYLPDWLEDTLSEGIRQWWKLKPGPPPPKPAERHKDDSRGLVLPGCKYLGPFNGLDKGEPVNEADAAALEHDKAYDRQLDSGDNPYLKYNHADAEFQERLKEDTSFGGNLGRAVFQAKKRVLEPLGLVEEPVKTAPGKKRPVEHSPVEPDSSSGTGKAGQQPARKRLNFGQTGDADSVPDPQPLGQPPAAPSGLGTNTMATGSGAPMADNNEGADGVGNSSGNWHCDSTWMGDRVITTSTRTWALPTYNNHLYKQISSQSGASNDNHYFGYSTPWGYFDFNRFHCHFSPRDWQRLINNNWGFRPKRLNFKLFNIQVKEVTQNDGTTTIANNLTSTVQVFSDSEYQLPYVLGSAHQGCLPPFPADVFMIPQYGYLTLNNGSQAVGRSSFYCLEYFPSQMLRTGNNFTFNYTFEDVPFHSSYAHSQSLDRLMNPLIDQYLYYLNRTQNQSGSAQNNDLLFSRGSPAGMSVQPKNWLPGPCYRQQRVSKTKTDNNNSNFTWTGASKYNLNGRESIINPGTAMASHKDDKDKFFPMSGVMIFGKESAGASNTALDNVMITDEEEIKATNPVATERFGTVAVNLQSSSTDPATGDVHVMGALPGMVWQDRDVYLQGPIWAKIPHTDGHFHPSPLMGGFGLKNPPPQILIKNTPVPANPPAEFSATKFASFITQYSTGQVSVEIEWELQKENSKRWNPEVQYTSNYAKSANVDFTVDNNGLYTEPRPIGTRYLTRP

SEQ ID NO: 188 - protein, 734 aa, Adeno-associated virus 2
MAADGYLPDWLEDTLSEGIRQWWKLKPGPPPPKPAERHKDDSRGLVLPGYKYLGPFNGLDKGEPVNEADAAALEHDKAYDRQLDSGDNPYLKYNHADAEFQERLKEDTSFGGNLGRAVFQAKKRVLEPLGLVEEPVKTAPGKKRPVEHSPVEPDSSSGTGKAGQQPARKRLNFGQTGDADSVPDPQPLGQPPAAPSGLGTNTMATGSGAPMADNNEGADGVGNSSGNWHCDSTWMGDRVITTSTRTWALSTYNNHLYKQISSQSGASNDNHYFGYSTPWGYFDFNRFHCHFSPRDWQRLINNNWGFRPKRLNFKLFNIQVKEVTQNDGTTTIANNLTSTVQVFTDSEYQLPYVLGSAHQGCLPPFPADVFMVPQYGYLTLNNGSQAVGRSSFYCLEYFPSQMLRTGNNFTFSYTFEDVPFHSSYAHSQSLDRLMNPLIDQYLYYLSRTNTPSGTTTQSRLQFSQAGASDIRDQSRNWLPGPCYRQQRVSKTSADNNNSEYSWTGATKYHLNGRDSLVNPGPAMASHKDDEEKFFPQSGVLIFGKQGSEKTNVDIEKVMITDEEEIRTTNPVATEQYGSVSTNLQRGNRQAATADVNTQGVLPGMVWQDRDVYLQGPIWAKIPHTDGHFHPSPLMGGFGLKHPPPQILIKNTPVPANPSTTFSAAKFASFITQYSTGQVSVEIEWELQKENSKRWNPEIQYTSNYNKSINVDFTVDTNGVYSEPRPIGTRYLTRN

SEQ ID NO: 189 - protein, 738 aa, Adeno-associated virus 2
MAADGYLPDWLEDTLSEGIRQWWKLKPGPPPPKPAERHKDDSRGLVLPGYKYLGPFNGLDKGEPVNEADAAALEHDKAYDRQLDGGDNPYLKYNHADAEFQERLKEDTSFGGNLGRAVFQAKKRVLEPLGLVEEPVKTAPGKKRPVEHSPVEPDSSSGTGKAGQQPARKRLNFGQTGDADSVPDPQPLGQPPAAPSGLGTNTMATGSGAPMADNNEGADGVGNSSGNWHCDSTWMGDRVITTSTRTWALPTYNNHLYKQISSQSGASNDNHYFGYSTPWGYFDFNRFHCHFSPRDWQRLINNNWGFRPKRLNFKLFNIQVKEVTQNDGTTTIANNLTSTVQVFTDSEYQLPYVLGSAHQGCLPPFPADVFMVPQYGYLTLNNGSQAVGRSSFYCLEYFPSQMLRTGNNFTFSYTFEDVPFHSSYAHSQSLDRLMNPLIDQYLYYLSRTNTPSGTTTQSGLQFSQAGASDIRDQSRNWLPGPCYRQQRVSKTSADNNNSEYSWTGATKYHLNGRDSLVNPGPAMASHKDDEEKFFPQSGVLIFGKQGSEKTNVDIEKVMITDEEEIRTTNPVATEQYGSVSTNLQRGNRQAATADVNTQGVLPGMVWQDRDVYLQGPIWAKIPHTDGHFHPSPLMGGFGLKHPPPQILIKNTPVPANPSTTFSAAKFASFITQYSTGQVSVEIEWELQKENSKRWNPEIQYTSNYNKSVNVDFTVDTNGVYSEPRPIGTRYLTRNLLRP

SEQ ID NO: 190 - DNA, 2208 bp, synthetic construct
  misc_feature 1..2208: note = source = /note="Description of Artificial Sequence: Synthetic polynucleotide"
  source 1..2208: mol_type = other DNA
atggctgccgatggttatcttccagattggctcgaggacactctctctgaaggaataagacagtggtggaagctcaaacctggcccaccaccaccaaagcccgcagagcggcataaggacgacagcaggggtcttgtgcttcctgggtacaagtacctcggacccttcaacggactcgacaagggggagccggtcaacgaggcagacgccgcggccctcgagcacgacaaggcctacgaccggcagctcgacagcggagacaacccgtacctcaagtacaaccacgccgacgcagagtttcaggagcgccttaaagaagatacgtcttttgggggcaacctcggacgagcagtcttccaggcgaaaaagagggttcttgaacctctgggcctggttgaggaacctgttaagacggctccgggaaaaaagaggccggtagagcactctcctgtggagccagactcctcctcgggaaccggaaaagcgggccagcagcctgcaagaaaaagattaaattttggtcagactggagacgcagactccgtacctgacccccagcctctcggacagccaccagcagccccctctggtctgggatctactacaatggctacaggcagtggcgcaccaatggcagacaataacgagggtgccgatggagtgggtaattcctcaggaaattggcattgcgattcccaatggctgggcgacagagtcatcaccaccagcacccgaacctgggccctgcccacatacaacaaccacctctacaagcaaatctccagccaatcaggagccagcaacgacaaccactactttggctacagcaccccctgggggtattttgacttcaacagattccactgccacttttcaccacgtgactggcaaagactcatcaacaacaactggggattccggcccaaaagactcaacttcaagctctttaatattcaagtcaaagaggtcacgcagaatggcggtacgacgacgattgccaataaccttaccagcacggttcaggtgtttactgactcggagtaccagctcccgtacgtcctgggctcggcgcatcaaggatgcctcccgccgtttccagcggacgtcttcatggtcccacagtatggatacctcaccctgaacaacgggagtcaggcggtaggacgctcttccttttactgcctggagtactttccttctcagatgctgcgtactggaaacaactttcagttcagctacacttttgaagacgtgcctttccacagcagctacgctcacagccagagtctggatcggctgatgaatcctctgatcgaccagtacctgtattatctgaacaagacacaaacaaatagtggaactcttcagcagtctcggctactgtttagccaagctggaccaaccaacatgtctcttcaagctaaaaactggctgcctggaccttgctacagacagcagcgtctgtcaaaacaggcaaacggcaacaacaacagcaactttccctggactgcagctacaaagtatcatctaaatggccgggactcgttggttaatccaggaccagctatggccagtcacaaggatgacgaagaaaagtttttccccatgcatggaaccctgatatttggtaaacaaggaacaaatgccaacgacgcggatttggaaaatgtcatgattacagatgaagaagaaatcagggccaccaatcccgtggctacggagcagtacgggactgtgtcaaataatttgcaaaactcaaacactggtccaactactggaactgtcaatcaccaaggagcgttacctggtatggtgtggcaggatcgagacgtgtacctgcagggacccatttgggccaagattcctcacaccgatggacactttcatccttctccactgacgggaggttttggactcaaacacccgcctcctcagatcatgatcaaaaacactcccgttccagccaatcctcccacaaacttcagttctgccaagtttgcttctttcatcacacagtattccacgggacaggtcagcgtggagatcgagtgggagctgcagaaggagaacagcaaacgctggaatcccgaaattcagtacacttccaactacaacaagtctgttaatgtggactttactgtggacactaatggtgtgtattcagagcctcgccccattggcaccagatacctgactcgtaatctgtaa

SEQ ID NO: 191 - protein, 735 aa, synthetic construct
  REGION 1..735: note = source = /note="Description of Artificial Sequence: Synthetic polypeptide"
MAADGYLPDWLEDTLSEGIRQWWKLKPGPPPPKPAERHKDDSRGLVLPGYKYLGPFNGLDKGEPVNEADAAALEHDKAYDRQLDSGDNPYLKYNHADAEFQERLKEDTSFGGNLGRAVFQAKKRVLEPLGLVEEPVKTAPGKKRPVEHSPVEPDSSSGTGKAGQQPARKRLNFGQTGDADSVPDPQPLGQPPAAPSGLGSTTMATGSGAPMADNNEGADGVGNSSGNWHCDSQWLGDRVITTSTRTWALPTYNNHLYKQISSQSGASNDNHYFGYSTPWGYFDFNRFHCHFSPRDWQRLINNNWGFRPKRLNFKLFNIQVKEVTQNGGTTTIANNLTSTVQVFTDSEYQLPYVLGSAHQGCLPPFPADVFMVPQYGYLTLNNGSQAVGRSSFYCLEYFPSQMLRTGNNFQFSYTFEDVPFHSSYAHSQSLDRLMNPLIDQYLYYLNKTQTNSGTLQQSRLLFSQAGPTNMSLQAKNWLPGPCYRQQRLSKQANGNNNSNFPWTAATKYHLNGRDSLVNPGPAMASHKDDEEKFFPMHGTLIFGKQGTNANDADLENVMITDEEEIRATNPVATEQYGTVSNNLQNSNTGPTTGTVNHQGALPGMVWQDRDVYLQGPIWAKIPHTDGHFHPSPLTGGFGLKHPPPQIMIKNTPVPANPPTNFSSAKFASFITQYSTGQVSVEIEWELQKENSKRWNPEIQYTSNYNKSVNVDFTVDTNGVYSEPRPIGTRYLTRNL

SEQ ID NO: 192 - DNA, 2208 bp, synthetic construct
  misc_feature 1..2208: note = source = /note="Description of Artificial Sequence: Synthetic polynucleotide"
  source 1..2208: mol_type = other DNA
atggctgccgatggttatcttccagattggctcgaggacactctctctgaaggaataagacagtggtggaagctcaaacctggcccaccaccaccaaagctcgcagagcggcatcaggacgacagcaggggtcttgtgcttcctgggtacaagtacctcggacccttcaacggactcgacaaaggagagccggtcaacgaggcagacgccgcggccctcgagcacgacaaggcctacgaccggcagctcgacagcggagacaacccgtacctcaagtacaaccacgccgacgcggagtttcaggagcgtcttaaagaagatacgtcttttgggggcaacctcggacgagcagtcttccaggcgaaaaagagggttcttgaacctctgggcctggttgaggaacctgttaagacggctccgggaaaaaagaggccggtagagcactctcctgtggagccagactcctcctcgggaaccggaaaggcgggccatcagcctgcgagaaagagattgaattttggtcagactggagacgcagactccgtacctgacccccagcctctcggacagccaccagcagcccccacaagtctgggatctactacaatggctacaggcagtggcgcaccaatggcagacaataacgagggtgccgatggagtgggtaattcctcaggaaattggcattgcgattcccaatggctgggcgacagagtcatcaccaccagcacccgaacctgggccctgcccacctacaacaaccacctctacaagcaaatctccagccaatcaggagcctcgaacgacaaccactactttggctacagcaccccctgggggtattttgacttcaacagattccactgtcacttctccccacgtgattggcaaagactcatcaacaacaactggggattccgacccaagagactcaacttcaagctctttaacattcaagtcaaagaggtcacgcagaatgacggtacgacgacgattgccaataaccttaccagcacggttcaggtgtttactgactcggagtaccagctcccgtacgtcctcggctcggcgcatcaaggatgcctcccgccgtttccagcggacgtcttcacggtcccacagtatggatacctcaccctgaacaacgggagtcaggcggtaggacgctcttccttttactgcctggagtactttccttctcagatgctgcgtactggaaacaaccttaccttcagctacacctttgaggacgttcctttccacagcagctacgctcacagccagagtttggaccggctgatgaatcctctgatcgaccagtatctatattatctgaacaggacacaatcaaatagtggaactcttcagcagtctaggctactgtttagccaagctggacccaccagcatgtctcttcaagctaaaaactggctgcctggaccttgctacagacagcagcgtctttcaaagcaggcaaacgacaacaacaacagcaactttccctggactgcggctacaaagtatcatctaaatggccgggactcgttggttaatccaggaccagctatggccagccacaaagacgatgaagaaaagtttttccccatgcatggaaccctgatatttggtaaacaaggaacaaatgctaacgacgcggatttggagcatgttatgattacagatgaagaagaaatcaggaccaccaatcctgtggctacagagcagtacggaaacgtgtcaaataatttgcaaaactcaaatactggtccaactacagaaaatgtcaatcaccagggagcgttacctggtatggtgtggcaggatcgagacgtgtacctgcagggacccatttgggccaagattcctcacaccgacggacactttcacccttctccactgatgggaggttttggactcaaacacccgcctcctcaaatcatgatcaaaaacactcccgttccagccaatcctcccacaaactacagttctgccaagtttgcttctttcatcacacagtattccacgggccaggtcagcgtggagattgagtgggagctgcggaaggagaacagcaaacgctggaaccccgagatccagtatacttccaactacaacaaatctgttaatgtggactttactgtggacactaatggtgtgtattcagagcctcgccccattggcaccagatacctgactcgtaatctgtaa

SEQ ID NO: 193 - protein, 735 aa, synthetic construct
  REGION 1..735: note = source = /note="Description of Artificial Sequence: Synthetic polypeptide"
MAADGYLPDWLEDTLSEGIRQWWKLKPGPPPPKLAERHQDDSRGLVLPGYKYLGPFNGLDKGEPVNEADAAALEHDKAYDRQLDSGDNPYLKYNHADAEFQERLKEDTSFGGNLGRAVFQAKKRVLEPLGLVEEPVKTAPGKKRPVEHSPVEPDSSSGTGKAGHQPARKRLNFGQTGDADSVPDPQPLGQPPAAPTSLGSTTMATGSGAPMADNNEGADGVGNSSGNWHCDSQWLGDRVITTSTRTWALPTYNNHLYKQISSQSGASNDNHYFGYSTPWGYFDFNRFHCHFSPRDWQRLINNNWGFRPKRLNFKLFNIQVKEVTQNDGTTTIANNLTSTVQVFTDSEYQLPYVLGSAHQGCLPPFPADVFTVPQYGYLTLNNGSQAVGRSSFYCLEYFPSQMLRTGNNLTFSYTFEDVPFHSSYAHSQSLDRLMNPLIDQYLYYLNRTQSNSGTLQQSRLLFSQAGPTSMSLQAKNWLPGPCYRQQRLSKQANDNNNSNFPWTAATKYHLNGRDSLVNPGPAMASHKDDEEKFFPMHGTLIFGKQGTNANDADLEHVMITDEEEIRTTNPVATEQYGNVSNNLQNSNTGPTTENVNHQGALPGMVWQDRDVYLQGPIWAKIPHTDGHFHPSPLMGGFGLKHPPPQIMIKNTPVPANPPTNYSSAKFASFITQYSTGQVSVEIEWELRKENSKRWNPEIQYTSNYNKSVNVDFTVDTNGVYSEPRPIGTRYLTRNL

SEQ ID NO: 194 - DNA, 2208 bp, synthetic construct
  misc_feature 1..2208: note = source = /note="Description of Artificial Sequence: Synthetic polynucleotide"
  source 1..2208: mol_type = other DNA
atggctgccgatggttatcttccagattggctcgaggacactctctctgaaggaataagacagtggtggaagctcaaacctggcccaccaccaccaaagcccgcagagcggcatcaggacgacagcaggggtcttgtgcttcctgggtacaagtacctcggacccttcaacggactcgacaaaggagagccggtcaacgaggcagacgccgcggccctcgagcacgacaaggcctacgaccggcagctcgacagcggagacaacccgtacctcaagtacaaccacgccgacgcggagtttcaggagcgtcttaaagaagatacgtcttttgggggcaacctcggacgagcagtcttccaggcgaaaaagagggttcttgaacctctgggcctggttgaggaacctgttaagacggctccgggaaaaaagaggccggtagagcactctcctgtggagccagactcctcctcgggaaccggaaaagcgggccatcagcctgcgagaaagagattgaattttggtcagactggagacgcagactccgtacctgacccccagcctctcggacagccaccagcagcccccacaagtttgggatctactacaatggctacaggcagtggcgcaccaatggcagacaataacgagggtgccgatggagtgggtaattcctcaggaaattggcattgcgattcccaatggctgggcgacagagtcatcaccaccagcacccgaacctgggccctgcccacctacaacaaccacctctacaagcaaatctccagccaatcaggagcctcgaacgacaaccactactttggctacagcaccccctgggggtattttgacttcaacagattccactgtcacttctccccacgtgattggcaaagactcatcaacaacaactggggattccgacccaagagactcaacttcaagctctttaacattcaagtcaaggaggtcacgcagaatgacggtacgacgacgattgccaataaccttaccagcacggttcaggtgtttactgactcggagtaccagctcccgtacgtcctcggctcggcgcatcaaggatgcctcccgccgtttccagcggacgtcttcatggtcccacagtatggatacctcaccctgaacaacgggagtcaggcggtaggacgctcttccttttactgcctggagtactttccttctcagatgctgcgtactggaaacaactttaccttcagctacacctttgaggacgttcctttccacagcagctacgctcacagccagagtttggaccggctgatgaatcctctgatcgaccagtatctatattatctgaacaggacacaatcaaatagtggaactcttcagcagtctaggctactgtttagccaagctggacccaccagcatgtctcttcaagctaaaaactggctgcctggaccttgctacagacagcagcgtctttcaaagcaggcaaacgacaacaacaacagcaactttccctggactgcggctacaaagtatcgtctaaatggccgggactcgttggttaatccaggaccagctatggccagccacaaagacgatgaagaaaagtttttccccatgcatggaaccctgatatttggtaaacaaggaacaaatgctaacgacgcggatttggagcatgttatgattacagatgaagaagaaatcaggaccaccaatcctgtggctacagagcagtacggaaacgtgtcaaataatttgcaaaactcaaatactggtccaactacagaaaatgtcaatcaccagggagcgttacctggtatggtgtggcaggatcgagacgtgtacctgcagggacccatttgggccaagattcctcacaccgacggacactttcacccttctccactgatgggaggttttggactcaaacacccgcctcctcaaatcatgatcaaaaacactcccgttccagccaatcctcccacaaacttcagttctgccaagtttgcttctttcatcacacagtattccacgggccaggtcagcgtggagattgagtgggagctgcagaaggagaacagcaaacgctggaaccccgagatccagtatacttccaactacaacaaatctgttaatgtggactttactgtggacactaatggtgtgtattcagagcctcgccccattggcaccagatacctgactcgtaatctgtaa

SEQ ID NO: 195 - protein, 735 aa, synthetic construct
  REGION 1..735: note = source = /note="Description of Artificial Sequence: Synthetic polypeptide"
MAADGYLPDWLEDTLSEGIRQWWKLKPGPPPPKPAERHQDDSRGLVLPGYKYLGPFNGLDKGEPVNEADAAALEHDKAYDRQLDSGDNPYLKYNHADAEFQERLKEDTSFGGNLGRAVFQAKKRVLEPLGLVEEPVKTAPGKKRPVEHSPVEPDSSSGTGKAGHQPARKRLNFGQTGDADSVPDPQPLGQPPAAPTSLGSTTMATGSGAPMADNNEGADGVGNSSGNWHCDSQWLGDRVITTSTRTWALPTYNNHLYKQISSQSGASNDNHYFGYSTPWGYFDFNRFHCHFSPRDWQRLINNNWGFRPKRLNFKLFNIQVKEVTQNDGTTTIANNLTSTVQVFTDSEYQLPYVLGSAHQGCLPPFPADVFMVPQYGYLTLNNGSQAVGRSSFYCLEYFPSQMLRTGNNFTFSYTFEDVPFHSSYAHSQSLDRLMNPLIDQYLYYLNRTQSNSGTLQQSRLLFSQAGPTSMSLQAKNWLPGPCYRQQRLSKQANDNNNSNFPWTAATKYRLNGRDSLVNPGPAMASHKDDEEKFFPMHGTLIFGKQGTNANDADLEHVMITDEEEIRTTNPVATEQYGNVSNNLQNSNTGPTTENVNHQGALPGMVWQDRDVYLQGPIWAKIPHTDGHFHPSPLMGGFGLKHPPPQIMIKNTPVPANPPTNFSSAKFASFITQYSTGQVSVEIEWELQKENSKRWNPEIQYTSNYNKSVNVDFTVDTNGVYSEPRPIGTRYLTRNL

SEQ ID NO: 196 - DNA, 2208 bp, synthetic construct
  misc_feature 1..2208: note = source = /note="Description of Artificial Sequence: Synthetic polynucleotide"
  source 1..2208: mol_type = other DNA
atggctgccgatggttatcttccagattggctcgaggacactctctctgaaggaataagacagtggtggaagctcaaacctggcccaccaccaccaaagcccgcagagcggcatcaggacgacagcaggggtcttgtgcttcctgggtacaagtacctcggacccttcaacggactcgacaaaggagagccggtcaacgaggcagacgccgcggccctcgagcacgacaaggcctacgaccggcagctcgacagcggagacaacccgtacctcaagtacaaccacgccgacgcggagtttcaggagcgtcttaaagaagatacgtcttttgggggcaacctcggacgagcagtcttccaggcgaaaaagagggttcttgaacctctgggcctggttgaggaacctgttaagacggctccgggaaaaaagaggccggtagagcactctcctgtggagccagactcctcctcgggaaccggaaaagcgggccatcagcctgcgagaaagagattgaattttggtcagactggagacgcagactccgtacctgacccccagcctctcggacagccaccagcagcccccacaagtttgggatctactacaatggctacaggcagtggcgcaccaatggcagacaataacgagggtgccgatggagtgggtaattcctcaggaaattggcattgcgattcccaatggctgggcgacagagtcatcaccaccagcacccgaacctgggccctgcccacctacaacaaccacctctacaagcaaatctccagccaatcaggagcctcgaacgacaaccactactttggctacagcaccccctgggggtattttgacttcaacagattccactgtcacttctccccacgtgattggcaaagactcatcaacaacaactggggattccgacccaagagactcaacttcaagctctttaacattcaagtcaaagaggtcacgcagaatgacggtacgacgacgattgccaataaccttaccagcacggttcaggtgtttactgactcggagtaccagctcccgtacgtcctcggctcggcgcatcaaggatgcctcccgccgtttccagcggacgtcttcatggtcccacagtatggatacctcaccctgaacaacgggagtcaggcggtaggacgcccttccttttactgcctggagtactttccttctcagatgctgcgtactggaaacaactttaccttcagctacacctttgaggacgttcctttccacagcagctacgctcacagccagagtttggaccggctgatgaatcctctgatcgaccagtatctatattatctgaacaggacacaatcaaatagtggaactcttcagcagtctaggctactgtttagccaagctggacccaccagcatgtctcttcaagctaaaaactggctgcctggaccttgctacagacagcagcgtctttcaaagcaggcaaacgacaacaacaacagcaactttccctggactgcggctacaaagtatcatctaaatggccgggactcgttggttaatccaggaccagctatggccagccacaaagacgatgaagaaaagtttttccccatgcatgggaccctgatatttggtaaacaaggaacaaatgctaacgacgcggatttggagcatgttatgattacagatgaagaagaaatcaggaccaccaatcctgtggctacagagcagtacggaaacgtgtcaaataatttgcaaaactcaaatactggtccaactacagaaaatgtcaatcaccagggagcgttacctggtatggtgtggcaggatcgagacgtgtacctgcagggacccatttgggccaagattcctcacaccgacggacactttcacccttctccactgatgggaggttttggactcaaacacccgcctcctcaaatcatgatcaaaaacactcccgttccagccaatcctcccacaaacttcagttctgccaagtttgcttctttcatcacacagtattccacgggccaggtcagcgtggagattgagtgggagctgcagaaggagaacagcaaacgctggaaccccgagatccagtatacttccaactacaacaaatctgttaatgtggactttactgtggacactaatggtgtgtattcagagcctcgccccattggcaccagatacctgactcgtaatctgtaa

SEQ ID NO: 197 - protein, 735 aa, synthetic construct
  REGION 1..735: note = source = /note="Description of Artificial Sequence: Synthetic polypeptide"
MAADGYLPDWLEDTLSEGIRQWWKLKPGPPPPKPAERHQDDSRGLVLPGYKYLGPFNGLDKGEPVNEADAAALEHDKAYDRQLDSGDNPYLKYNHADAEFQERLKEDTSFGGNLGRAVFQAKKRVLEPLGLVEEPVKTAPGKKRPVEHSPVEPDSSSGTGKAGHQPARKRLNFGQTGDADSVPDPQPLGQPPAAPTSLGSTTMATGSGAPMADNNEGADGVGNSSGNWHCDSQWLGDRVITTSTRTWALPTYNNHLYKQISSQSGASNDNHYFGYSTPWGYFDFNRFHCHFSPRDWQRLINNNWGFRPKRLNFKLFNIQVKEVTQNDGTTTIANNLTSTVQVFTDSEYQLPYVLGSAHQGCLPPFPADVFMVPQYGYLTLNNGSQAVGRPSFYCLEYFPSQMLRTGNNFTFSYTFEDVPFHSSYAHSQSLDRLMNPLIDQYLYYLNRTQSNSGTLQQSRLLFSQAGPTSMSLQAKNWLPGPCYRQQRLSKQANDNNNSNFPWTAATKYHLNGRDSLVNPGPAMASHKDDEEKFFPMHGTLIFGKQGTNANDADLEHVMITDEEEIRTTNPVATEQYGNVSNNLQNSNTGPTTENVNHQGALPGMVWQDRDVYLQGPIWAKIPHTDGHFHPSPLMGGFGLKHPPPQIMIKNTPVPANPPTNFSSAKFASFITQYSTGQVSVEIEWELQKENSKRWNPEIQYTSNYNKSVNVDFTVDTNGVYSEPRPIGTRYLTRNL

SEQ ID NO: 198 - DNA, 2208 bp, synthetic construct
  misc_feature 1..2208: note = source = /note="Description of Artificial Sequence: Synthetic polynucleotide"
  source 1..2208: mol_type = other DNA
atggctgccgatggttatcttccagattggctcgaggacactctctctgaaggaataagacagtggtggaagctcaaacctggcccaccaccaccaaagcccgcagagcggcataaggacgacagcaggggtcttgtgcttcctgggtacaagtacctcggacccttcaacggactcgacaagggagagccggtcaacgaggcagacgccgcggccctcgagcacgacaaggcctacgaccggcagctcgacagcggagacaacccgtacctcaagtacaaccacgccgacgcggagtttcaggagcgccttaaagaagatacgtcttttgggggcaacctcggacgagcagtcttccaggcaaaaaagagggttcttgaacctctgggcctggttgaggagcctgttaaaacggctccgggaaaaaagaggccggtagagcactctcctgcggagccagactcctcctcgggaaccggaaaagcgggccagcagcctgcaagaaaaagattgaatttcggtcagactggagacgcagactccgtacctgacccccagcctctcggacagccaccagcagccccctctggtctgggaactaatacgatggcttcaggcagtggcgcaccaatggcagacaataacgagggcgccgacggagtgggtaattcctcgggaaattggcattgcgattccacatggatgggcgacagagtcatcaccaccagcacccgaacttgggccctgcccacctacaacaaccatctctacaagcaaatctccagccaatcaggagccagcaacgacaaccactactttggctacagcaccccttgggggtattttgacttcaacagattccactgccacttttcaccacgtgactggcaaagactcatcaacaacaactggggattccggcccaagagactcaacttcaagctctttaacattcaagtcaaagaggtcacgcagaatgacggtacgacgacgattgccaataaccttaccagcacggttcaggtgtttactgactcggagtaccagctcccgtacgtcctcggctcggcgcatcaaggatgcctcccgccgttcccagcagacgtcttcatggtgccacagtatggatacctcaccctgaacaacgggagtcaggcagtaggacgctcttcattttactgcctggagtactttccttctcagatgctgcgtaccggaaacaactttaccttcagctacacctttgaggacgttcctttccacagcagctacgctcacagccagagtttggaccgtctcatgaatcctctcatcgaccagtacctgtattacttgagcagaacaaacactccaagcggaaccaccacgcagtccaggcttcagttttctcaggccggagcaagtgacattcgggaccagtctaggaactggcttcctggaccctgttaccgccagcagcgagtatcaaagacatctgcggataacaacaacagtgaatactcgtggactggagctaccaagtaccacctcaatggcagagactctctggtgaatccgggcccggccatggccagccacaaggacgatgaagaaaagttttttcctcagagcggggttctcatctttgggaagcaaggctcagagaaaacaaatgtggacattgaaaaggtcatgattacagacgaagaggaaatcaggaccaccaatcccgtggctacggagcagtatggttctgtatctaccaacctgcagggcggcaacacacaagcagctaccgcagatgtcaacacacaaggcgttcttccaggcatggtctggcaggacagagacgtgtacctgcaggggcccatctgggcaaagattccacacacggacggacattttcacccctctcccctcatgggcggattcggacttaaacaccctcctccacagattctcatcaagaacaccccggtacctgcgaatccttcgaccaccttcagtgcggcaaagtttgcttctttcatcacacagtattccacggggcaggtcagcgtggagatcgagtgggagctgcagaaggagaacagcaaacgctggaatcccgagatccagtacacttccaactacaacaaatctgttaatgtggactttactgttgacactaatggcgtgtattcagagcctcgccccattggcaccagatacctgactcgtaatctgtaa

SEQ ID NO: 199 - protein, 735 aa, synthetic construct
  REGION 1..735: note = source = /note="Description of Artificial Sequence: Synthetic polypeptide"
MAADGYLPDWLEDTLSEGIRQWWKLKPGPPPPKPAERHKDDSRGLVLPGYKYLGPFNGLDKGEPVNEADAAALEHDKAYDRQLDSGDNPYLKYNHADAEFQERLKEDTSFGGNLGRAVFQAKKRVLEPLGLVEEPVKTAPGKKRPVEHSPAEPDSSSGTGKAGQQPARKRLNFGQTGDADSVPDPQPLGQPPAAPSGLGTNTMASGSGAPMADNNEGADGVGNSSGNWHCDSTWMGDRVITTSTRTWALPTYNNHLYKQISSQSGASNDNHYFGYSTPWGYFDFNRFHCHFSPRDWQRLINNNWGFRPKRLNFKLFNIQVKEVTQNDGTTTIANNLTSTVQVFTDSEYQLPYVLGSAHQGCLPPFPADVFMVPQYGYLTLNNGSQAVGRSSFYCLEYFPSQMLRTGNNFTFSYTFEDVPFHSSYAHSQSLDRLMNPLIDQYLYYLSRTNTPSGTTTQSRLQFSQAGASDIRDQSRNWLPGPCYRQQRVSKTSADNNNSEYSWTGATKYHLNGRDSLVNPGPAMASHKDDEEKFFPQSGVLIFGKQGSEKTNVDIEKVMITDEEEIRTTNPVATEQYGSVSTNLQGGNTQAATADVNTQGVLPGMVWQDRDVYLQGPIWAKIPHTDGHFHPSPLMGGFGLKHPPPQILIKNTPVPANPSTTFSAAKFASFITQYSTGQVSVEIEWELQKENSKRWNPEIQYTSNYNKSVNVDFTVDTNGVYSEPRPIGTRYLTRNL

SEQ ID NO: 200 - DNA, 3161 bp, synthetic construct
  misc_feature 1..3161: note = source = /note="Description of Artificial Sequence: Synthetic polynucleotide"
  source 1..3161: mol_type = other DNA
gattgaatttagcggccgcgaattcgcccttgctgcgtcaactggaccaatgagaactttccattcaatgattgcgtcgacaagatggtgatctggtgggaggagggaaagatgaccgccaaggtcatggagtcggccaaagccattctcggaggaagcaaggtgcgcgtggaccagaaatgtaagtcctcggcccagatagacccgactcccgtgattgtcacctccaacaccaacatgtgcgccgtgattgacgggaactcaacgaccttcgagcaccagcagccgttgcaagaccggatgttcaaatttgaactcacccgccgtctggatcatgactttgggaaggtcaccaagcaggaagtcaaagactttttccggtgggcaaaggatcacgtggttgaggtggagcatgaattctacgtcaaaaagggtggagccaagaaaagacccgcccccagtgacgcagatataagtgagcccaaacgggcgcgcgggtcagttgcgcagccatcgacgtcagacgcggaagcttcgatcaactacgcggacaggtaccaaaacaaatgttctcgtcacgtgggcatgaatctgatgctgtttccctgcagacaatgcgagagaatgaatcaaaattcaaatatctgcttcactcacggacagaaggactgtttagagtgctttcccgtgtcagaatctcaacccgtttctgtcgtcaaaaaggcgtatcagaaactttgctacattcatcatatcatgggaaaggtgccagacgcttgcactgcctgcgatctggtcaatgtggatttggatgactgcatctctgaacaataaatgatttaaatcaggtatggctgccgatggttatcttccagattggctcaaggacactctctctgaaggaataagacagtggtggaagctcaaacctggcccaccaccaccaaagcccgcagagcggcataaggacgacagcgggggtcttgtgcttcctgggtacaagtacctcggacccttcaacggactcgacaagggagagccggtcaacgaggcagacgccgcggccctcgagtacgacaaggcctacgaccggcagctcgacagcggagacaacccgtacctcaagtacaaccacgccgacgcggagtttcaggagcgccttaaagaagatacgtcttttgggggcaacctcggacgagcagtcttccaggcgaaaaagagggttcttgaacctctgggcctggttgaggaacctgttaagacggctccgggaaaaaagaggccggtagagcactctcctgtggagccagactcctcctcgggaacaggaaaagcgggccagcagcctgcgagaaagagattgaattttggtcagactggagacgcagactccgtacctgacccccagcctctcggacagccaccagcagccccctctggtctgggaactaatacgatggctacaggcagtggcgcaccaatggcagacaataacgagggcgccgacggagtgggtaattcctcgggaagttggcattgcgattccacatggatgggcgacagagtcatcaccaccagcacccgaacctgggctctgcccacctacaacaaccatctgtacaagcagatctccagccaatcaggagccagcaacgacaaccactactttggctacagcaccccttgggggtattttgacttcaacagattccactgccacttttcaccacgtgactggcaaagactcatcaacaacaactggggattccggcccaagagactcaacttcaagctctttaacattcaagtcaaggaggtcacgcagaatgacggtacgacgacgattgccaataaccttaccagcacggttcaggtgtttactgactcggagtaccagctcccgtacgtccccggctcggcgcatcaaggatgcctcccgccgttcccagcagacgtcttcatggtgccacagtatggatacctcaccctgaacaacgggagtcaggcagtaggacgctcttcattttactgcctggagtactttccttctcagatgcttcgtaccggaaacaactttaccttcagctacacctttgaggatgttcctttccacagcagctacgctcacagccagagtttggaccgtctcatgaatcctctcatcgaccagtacctgtattacttgagcagaacaaacactccaagcggaaccaccacgcagtccaggcttcagttttctcaggccggagcaagtgacattcgggaccagtctaggaactggcttcctggaccctgttaccgccagcagcgagtatcaaagacagctgcggacaacaacaacagtgaatactcgtggactggagctaccaagtaccacctcaatggcagagactctctggtgaatccgggcccggccatggccagccacaaggacgatgaagaaaagttttttcctcaaagcggggttctcatctttgggaagcaaggctcagagaaaacaaatgtggacattgaaaaggtcatgattacagacgaagaggaaatcagaaccaccaatcccgtggccacggagcagtatggttctgtatctaccaacctccagagcggcaacacacaagcagctactgcagatgtcaacacacaaggcgttcttccaggcatggtctggcaggacagagacgtgcacctgcaggggcctatctgggcaaagattccacacacggacggacattttcacccctctcccctcatgggcggatttggacttaaacaccctcctccacagattctcatcaagaacaccccggtacctgcaaatccttcgaccaccttcagtgcggcaaagtttgcttccttcatcacacagtattccacagggcaggtcagcgtggagatcgagtgggagctgcagaaggagaacagcaaacgctggaaccccgagatccagtacacttccaactacaacaaatctgttaatgtggactttactgtggacactaatggtgtgtattcagagcctcgccccattggcaccagatacctgactcgtaatctgtaattgcttgttaatcaataaaccgtttaattcgtttcagttgaactttggtctctgcgaagggcgaattcgtttaaaccctgcaggactagtccctttagtgagg

SEQ ID NO: 201 - DNA, 3162 bp, synthetic construct
  misc_feature 1..3162: note = source = /note="Description of Artificial Sequence: Synthetic polynucleotide"
  source 1..3162: mol_type = other DNA
gaattgaatttagcggccgcgaattcgcccttcgcagagaccaaagttcaactgaaacgaattaaacggtttattgattaacaagcaattacagattacgagtcaggtatctggtgccaatggggcgaggctctgaatacacgccattagtgtccacagtaaagtccacattaacagacttgttgtagttggaagtgtactgaatttcgggattccagcgtttgctgttttccttctgcagctcccactcgatctccacgctgacctgtcccgtggagtactgtgtgatgaaggaagcaaactttgccgcactgaaggtggtcgaaggattcgcaggtaccggggtgttcttgatgagaatctgtggaggagggtgtttaagtccgaatccacccatgaggggagaggggtgaaaatgtccgtccgtgtgtggaatctttgcccagatgggcccctgaaggtacacatctctgtcctgccagaccatgcctggaagaacgccttgtgtgttgacatctgcggtagctgcttgtctgttgcctctctggaggttggtagatacagaaccgtactgctccgtagccacgggattggttgtcctgatttcctcttcgtctgtaatcatgaccttttcaatgtccacatttgttttctctgagccttgcttcccaaagatgagaaccccgctctgaggaaaaaacttttcttcattgtccttgtggcttgccatggccgggcccggattcaccagagagtctctgccattgaggtggtacttggtagctccagtccacgagtattcactgttgttgttatccgcagatgtctttgatactcgctgctggcggtaacagggtccaggaagccagttcctagactggtcccgaatgtcactcgctccggcctgagaaaactgaagccttgactgcgtggtggttccacttggagtgtttgttgtgctcaagtaatacaggtactggtcgatgagaggattcatgagacggtccagactctggctgtgagcgtagccgctgtggaaaggaacgtcctcaaaagtgtagctgaaggtaaagttgtttccggtacgcagcatctgagaaggaaagtactccaggcagtaaaatgaagagcgtcctactgcctgactcccgttgttcagggtgaggtatccatactgtggcaccatgaagacgtctgctgggaacggcgggaggcatccttgatgcgccgagccgaggacgtacgggagctggtactccgagtcagtaaacacctgaaccgtgctggtaaggttattggcaatcgtcgtcgtaccgtcattctgcgtgacctctttgacttgaatgttaaagagcttgaagttgagtctcttgggtcggaatccccagttgttgttgatgagtctttgccagtcacgtggtgaaaagtggcagtggaatctgttgaagtcaaaatacccccaaggggtgctgtagccaaagtagtgattgtcgttcgaggctcctgattggctggaaatttgtttgtagaggtggttgttgtaggtgggcagggcccaggttcgggtgctggtggtgatgactctgtcgcccatccatgtggaatcgcaatgccaatttcccgaggaattacccactccgtcggcgccctcgttattgtctgccattggtgcgccactgcctgtagccatcgtattagttcccagaccagagggggctgctggtggctgtccgagaggctgggggtcaggtactgagtctgcgtctccagtctgaccaaaattcaatctttttcttgcaggctgctggcccgcctttccggttcccgaggaggagtctggctccacaggagagtgctctaccggcctcttttttcctggagccgtcttgacaggttccccaaccaggcccagaggttcaagaaccctctttttcgcctggaagactgctcgtccgaggttgcccccaaaagacgtatcttctttaaggcgctcctgaaactccgcgtcggcgtggttgtacttgaggtacgggttgtctccgctgtcgagctgccggtcgtaggctttgtcgtgctcgagggccgcggcgtctgcctcgttgaccggctctcccttgtcgagtccgttgaagggtccgaggtacttgtacccaggaagcacaagacccctgctgtcgtccttatgccgctctgcgggctttggtggtggtgggccaggtttgagcttccaccactgtcttattccttcagagagagtgtcctcgagccaatctggaagataaccatcggcagccatacctgatttaaatcatttattgttcaaagatgcagtcatccaaatccacattgaccagatcgcaggcagtgcaagcgtctggcacctttcccatgatatgatgaatgtagcacagtttctgatacgcctttttgacgacagaaacgggttgagattctgacacgggaaagcactctaaacagtctttctgtccgtgagtgaagcagatatttgaattctgattcattctctcgcattgtctgcagggaaacagcatcagattcatgcccacgtgacgagaacatttgttttggtacctgtctgcgtagttgatcgaagcttccgcgtctgacgtcgatggctgcgcaactgactcgcgcacccgtttgggctcacttatatctgcgtcactgggggcgggtcttttcttggctccaccctttttgacgtagaattcatgctccacctcaaccacgtgatcctttgcccaccggaaaaagtctttgacttcctgcttggtgaccttcccaaagtcatgatccagacggcgggtgagttcaaatttgaacatccggtcttgcaacggctgctggtgttcgaaggtcgttgagttcccgtcaatcacggcgcacatgttggtgttggaggtgacgatcacgggagtcgggtctatctgggccgaggacttgcatttctggtccacgcgcaccttgcttcctccgagaatggctttggccgactccacgaccttggcggtcatcttcccctcctcccaccagatcaccatcttgtcgacacagtcgttgaagggaaagttctcattggtccagttgacgcagcaagggcgaattcgtttaaacctgcaggactagtccctttagtgaggg

SEQ ID NO: 202 - DNA, 3164 bp, synthetic construct
  misc_feature 1..3164: note = source = /note="Description of Artificial Sequence: Synthetic polynucleotide"
  source 1..3164: mol_type = other DNA
gcgaattgaatttagcggccgcgaattcgcccttcgcagagaccaaagttcaactgaaacgaattaaacggtttattgattaacaagcaattacaaattacgagtcaggtatctggtgccaatggggcgaggctctgaatacacgccattagtgtccacagtaaagtccacattaacagacttgttgtagttggaagtgtactgaatttcgggattccagcgtttgctgttttccttctgcagctcccactcgatctccacgctgacctgtcccgtggagtactgtgtgatgaaggaagcaaactttgccgcactgaaggtggtcgaaggattcgcaggtaccggggtgttcttgatgagaatctgtggaggagggtgtttaggtccgaatccacccatgaggggagaggggtgaaaatgtccgtccgtgtgtggaatctttgcccagatgggcccctgaaggtacacatctctgtcctgccagaccatgcctggaagaacgccttgtgtgttgacatctgcggtagctgcttgtctgttgcctctctggaggttggtagatacagaaccatactgctccgtagccacgggattggttgtcctgatttcctcttcgtctgtaatcatgaccttttcaatgtccacatttgttttctctgagccttgcttcccaaagatgagaaccccgctctgaggaaaaaacttttcttcattgtccttgtggcttgccatggccgggcccggattcaccagagagtctctgccattgaggtggtacttggtagctccagtccacgagtattcactgttgttgttatccgcagatgtctttgatactcgctgctggcggtaacagggtccaggaagccagttcctagactggtcccgaatgtcactcgctccggcctgagaaaactgaagccttgactgcgtggtggttccacttggagtgtttgttgtgctcaagtaatacaggtactggtcgatgagaggattcatgagacggtccagactctggctgtgagcgtagctgctgtggaaaggaacgtcctcaaaagtgtagctgaaggtaaagttgtttccggtacgcagcatctgagaaggaaagtactccgggcagtaaaatgaagagcgtcctactgcctgactcccgttgctcagggtgaggtatccatactgtggcaccatgaagacgtctgctgggaacggcgggaggcatccttgatgcgccgagccgaggacgtacgggagctggtactccgagtcagtaaacacctgaaccgtgctggtaaggttattggcaatcgtcgtcgtaccgtcattctgcgtgacctctttgacttgaatgttaaagagcttgaagttgagtctcttgggtcggaatccccagttgttgttgatgagtctttgccagtcacgtggtgaaaagtggcagtggaatctgttgaagtcaaaatacccccaaggggtgctgtagccaaagtagtgattgtcgttcgaggctcctgattggctggaaatttgtctgtagaggtggttgttgtaggtgggcagggcccaggttcgggtgctggtggtgatgactctgtcgcccatccatgtggaatcgcaatgccgatttcccgaggaattacccactccgtcggcgccctcgttattgtctgccattggtgcgccactgcctgtagccatcgtattagttcccagaccagagggggctgctggtggctgtccgagaggctgggggtcaggtactgagtctgcgtctccagtctgaccaaaattcaatctttttcttgcaggctgctggcccgcctttccggttcccgaggaggagtctggctccacaggagagtgctctaccggcctcttttttcccggagccgtcttaacaggttccccaaccaggcccagaggttcaagaaccctctttttcgcctggaagactgctcgtccgaggttgcccccaaaagacgtatcttctttaaggcgctcctgaaactccgcgtcggcgtggttgtacttgaggtacgggttgtctccgctgtcgagctgccggtcgtaggctttgtcgtgctcgagggccgcggcgtctgcctcgttgaccggctctcccttgtcgagtccgttgaagggtccgaggtacttgtacccaggaagcacaagacccctgctgtcgtccttatgccgctctgcgggctttggtggtggtgggccaggtttgagcttccaccactgtcttattccttcagagagagtgtcctcgagccaatctggaagataaccatcggcagccatacctgatttaaatcatttattgttcaaagatgcagtcatccaaatccacattgaccagatcgcaggcagtgcaagcgtctggcacctttcccatgatatgatgaatgtagcacagtttctgatacgcctttttgacgacagaaacgggttgagattctgacacgggaaagcactctaaacagtctttctgtccgtgagtgaagcagatatttgaattctgattcattctctcgcattgtctgcagggaaacagcatcagattcatgcccacgtgacgagaacatttgttttggtacctgtctgcgtagttgatcgaagcttccgcgtctgacgtcgatggctgcgcaactgactcgcgcacccgtttgggcccacttatatctgcgtcactgggggcgggtcttttcttggctccaccctttttgacgtagaattcatgctccacctcaaccacgtgatcctttgcccaccggaaaaagtctttgacttcctgcttggtgaccttcccaaagtcatgatccagacggcgggtgagttcaaatttgaacatccggtcttgcaacggctgctggtgttcgaaggtcgttgagttcccgtcaatcacggcgcacatgttggtgttggaggtgacgatcacgggagtcgggtctatctgggccgaggacttgcatttctggtccacgcgcaccttgcttcctccgagaatggctttggccgactccacgaccttggcggtcatcttcccctcctcccaccagatcaccatcttgtcgacacagtcgttgaagggaaagttctcattggtccagttgacgcagcaagggcgaattcgtttaaacctgcaggactagtccctttagtgaggg

SEQ ID NO: 203 - DNA, 3163 bp, synthetic construct
  misc_feature 1..3163: note = source = /note="Description of Artificial Sequence: Synthetic polynucleotide"
  source 1..3163: mol_type = other DNA
accctcactaaagggactagtcctgcaggtttaaacgaattcgcccttgctgcgtcaactggagcaatgagaactttcccttcaacgactgtgtcgacaagatggtgatttggtgggaggaggggaagatgaccgccaaggtcgtggagtcggccaaagccattctcggaggaagcaaggtgcgcgtggaccagaaatgcaagtcctcggcccagatagatccgactcccgtgatcgtcacctccaacaccaacatgtgcgccgtgattgacgggaactcaacgaccttcgaacaccagcagccgttgcaagaccggatgttcaaatttgaactcacccgccgtctggatcatgactttgggaaggtcaccaagcaggaagtcaaagactttttccggtgggcaaaggatcacgtggttgaggtggagcatggattctacgtcaaaaagggtggagccaagaaaagacccgcccctagtgacgcagatataagtgagcccaaacgggtgcgcgagtcagttgcgcagccatcgacgtcggacgcggaagcttcgatcaactacgcggacaggtaccaaaacaaatgttctcgtcacgtgggcatgaatctgatgctgtttccctgcagacaatgcgagagaatgaatcaaaattcaaatatctgcttcactcacggacagaaagactgtttagagtgctttcccgtgtcagaatctcaacctgtttctgtcgtcaaaaaggcgtatcagaaactgcgctacattcatcatatcatgggaaaggtgccagacgcttgcactgcctgcgatctggtcaatgtggatttggatgactgcatctctgaacaataaatgatttaaatcaggtatggctgccgatggttatcttccagattggctcgaggacactctctctgaaggaataagacagtggtggaagctcaaacctggcccaccaccaccaaagcccgcagagcggcataaggacgacagcaggggtcttgtgcttcctgggtacaagtacctcggacccttcaacggactcgacaagggagagccggtcaacgaggcagacgccgcggccctcgagcacgacaaggcctacgaccggcagctcgacagcggagacaacccgtacctcaagtacaaccacgccgacgcggagtttcaggagcgtcttaaagaagatacgtcttttgggggcaacctcggacgagcagtcttccaggcgaaaaagagggttcttgaacctctgggcctggttgaggaacctgttaagacggctccgggaaaaaagaggccggtagagcactctcctgcggagccagactcctcctcgggaaccggaaaagcgggccagcagcctgcaagaaaaagactgaatttcggtcagactggagacgcagactccgtacctgacccccagcctctcggacagccaccagcagcccccacaagtttgggatctactacaatggctacaggcagtggcgcaccaatggcagacaataacgagggtgccgatggagtgggtaattcctcaggaaattggcattgcgattcccaatggctgggcgacagagtcatcaccaccagcacccgaacctgggccctgcccacctacaacaaccacctttacaagcaaatctccagccaatcaggagcctcaaacgacaaccactactttggctacagcaccccctgggggtattttgacttcaacagattccactgccacttttcaccacgtgactggcaaagactcatcaacaacaactggggattccgacccaagagactcaacttcaagctctttaacattcaagtcaaagaggtcacgcagaatgacggtacgacgacgattgccaataaccttaccagcacggttcaggtgtttactgactcggagtaccagctcccgtacgtcctcggctcggcgcatcaaggatgcctcccgccgtttccagcggacgtcttcatggtcccacagtatggatacctcaccctgaacaacgggagtcaggcggtaggacgctcttccttttactgcctggagtgctttccttctcagatgctgcgtactggaaacaactttcagttcagctacacttttgaagacgtgcctttccacagcagctacgctcacagccagagtttggatcggctgatgaatcctctgatcgaccagtacctgtattatctaaacagaacacaaacagctagtggaactcagcagtctcggctactgtttagccaagctggacccacaagcatgtctcttcaagctaaaaactggctgcctggaccgtgttatcgccagcagcgtttgtcaaagcaggcaaacgacaacaacaacagcaactttccctggactggagctaccaagtaccacctcaatggcagagactctttggtgaacccgggcccggccatggccagccacaaggacgatgaagaaaagtttttccccatgcatggaaccctaatatttggtaaagaaggaacaaatgctaccaacgcggaattggaaaatgtcatgattacagatgaagaggaaatcaggaccaccaatcccgtggctacagagcagtacggatatgtgtcaaataatttgcaaaactcaaatactgctgcaagtactgaaactgtgaatcaccaaggagcattacctggtatggtgtggcaggatcgagacgtgtacctgcagggacccatttgggccaagattcctcacaccgatggacactttcatccttctccactgatgggaggttttggactcaaacacccgcctcctcagattatgatcaaaaacactcccgttccagccaatcctcccacaaacttcagttctgccaagtttgcttccttcatcacacagtattccacgggacaggtcagcgtggagatcgagtgggagctgcagaaggagaacagcaaacgctggaatcccgaaattcagtacacttccaactacaacaaatctgttaatgtggactttactgtggacactaatggtgtgtattcagagcctcgccccattggcaccagatacctgactcgtaatctgtaattgcttgttaatcaataaaccgtttaattcgtttcagttgaactttggtctctgcgaagggcgaattcgcggccgctaaattcaattcgcc

SEQ ID NO: 204 - protein, 735 aa, synthetic construct
  REGION 1..735: note = source = /note="Description of Artificial Sequence: Synthetic polypeptide"
MAADGYLPDWLEDTLSEGIRQWWKLKPGPPPPKPAERHKDDSRGLVLPGYKYLGPFNGLYKGEPVDEADAAALEHDKAYDRQLDSGDNPYLKYNHADAEFQERLKEDTSFGGNLGRAVFQAKKRVLEPLGLVGEPVKTAPGKKRPVEHSPVEPDSSSGTGKAGNQPARKRLNFGQTGDADSVPDPQPLGQPPAAPSGLGSTTMATGSGAPVADNNEGADGVGNSSGNWHCDSQWLGDRVITTSTRTWALPTYNNHLYKQISSQSGASNDNHYFGYSTPWGYFDFNRFHCHFSPRDRQRLINNNWGFRPKRLNFKLFNIQVKEVTQNDGTTTIANNLTSTVQVFTDSGYQLPYVLGLAHQGCLPPFPADVFMVPQYGYLTLNNGSQAVGRSSFYCLEYFPSQMLRTGNNFQFSYTFEDVPFHSSYAHSQSLDRLMNPLIDQYLYYLNKTQSNSGTLQQSRLLFSQAGPTSMSLQAKNWLPGPCYRQQRLSKQANDNNNSNFPWTAATKYHLNGRDSLVNPGPAMASHKDDEEKFFPMHGTLIFGKQGTNANDADLDNVMITDEEEIRTTNPVATEQYGYVSNNLQNSNTGPTTGTVNHQGALPGMVWQDRDVYLQGPIWAKIPHTDGHFHPSPLMGGFGLKHPPPQIMIKNTPVPANPPTNFSSAKFASFITQYSTGQVSVEIEWELQKEDSKRWNPEIQYTSNYNKPVNVDFTVDTNGVYSEPRPIGTRYLTRNL

SEQ ID NO: 205 - DNA, 2208 bp, synthetic construct
  misc_feature 1..2208: note = source = /note="Description of Artificial Sequence: Synthetic polynucleotide"
  source 1..2208: mol_type = other DNA
atggctgccgatggttatcttccagattggctcgaggacactctctctgaaggaataagacagtggtggaagctcaaacctggcccaccaccaccaaagcccgcagagcggcataaggacgacagcaggggtcttgtgcttcctgggtacaagtacctcggacccttcaacggactctacaagggagagccggtcgacgaggcagacgccgcggccctcgagcacgacaaggcctacgaccggcagctcgacagcggagacaacccgtacctcaagtacaaccacgccgacgcggagtttcaggagcgccttaaagaagatacgtcttttgggggcaacctcggacgagcagtcttccaggccaaaaagagggttcttgaacctctgggcttggttggggagcctgttaaaacggctccgggaaaaaagaggccggtagagcactctcctgtggagccagactcctcctcgggaaccggaaaagcgggcaaccagcctgcaagaaaaagattgaattttggtcagactggagacgcagactccgtacctgacccccagcctctcggacagccaccagcagccccctctggtctgggatctactacaatggctacaggcagtggcgcaccagtggcagacaataacgagggtgccgatggagtgggtaattcctcaggaaattggcattgcgattcccaatggctgggcgacagagtcatcaccaccagcacccgaacctgggctctgcccacctacaataaccacctctacaagcaaatctccagccaatcaggagcctcaaacgacaaccactactttggctacagcaccccctgggggtattttgacttcaacagattccactgccacttttcaccacgtgaccggcaaagactcatcaacaacaactggggattccgaccaaaaagactcaacttcaagctctttaacattcaagtcaaagaggtcacgcagaatgacggtacgacgacgattgccaataaccttaccagcacggttcaggtgtttactgactcggggtaccagctcccgtacgtcctcggcttggcgcatcaaggatgcctcccgccgttcccagcagacgtcttcatggtgccacagtatggatacctcaccctgaacaacgggagtcaggcggtaggacgctcttccttttactgcctggagtactttccttctcagatgctgcgtactggaaacaactttcagttcagctacacctttgaagacgttcctttccacagcagctacgctcacagccagagtctggatcggctgatgaatcctctgatcgaccagtacctgtattatctgaacaagacacaatcaaatagtggaactcttcagcagtctcggctactgtttagccaagctggacccaccagcatgtctcttcaagctaaaaactggctgcctggaccttgctacagacagcagcgtctgtcaaagcaggcaaacgacaacaacaacagcaactttccctggactgcggctacaaagtatcatctaaatggccgggactcgttggttaatccaggaccagctatggccagccacaaagacgatgaagaaaagtttttccccatgcatggaaccctgatatttggtaaacaaggaacaaatgctaacgacgcggatttggacaatgtcatgattacagatgaagaagaaatccgcaccaccaatcccgtggctacggagcagtacggatatgtgtcaaataatttgcaaaactcaaatactggtccaactactggaactgtcaatcaccaaggagcgttacctggtatggtgtggcaggatcgagacgtgtacctgcagggacccatttgggccaagattcctcacaccgatggacactttcatccttctccacttatgggaggttttggactcaaacacccacctcctcagatcatgattaaaaacactcccgttccagccaatcctcccacaaacttcagttctgccaagtttgcttctttcatcacacagtattccacgggacaagtcagcgtggagatcgagtgggagctgcagaaggaggacagcaaacgctggaaccccgagatccagtacacttccaactataacaaacctgttaatgtggactttactgtggacactaatggtgtgtattcagagcctcgccccattggcaccagatacctgactcgtaatctgtaa

SEQ ID NO: 206 - DNA, 3161 bp, synthetic construct
  misc_feature 1..3161: note = source = /note="Description of Artificial Sequence: Synthetic polynucleotide"
  source 1..3161: mol_type = other DNA
cgaattgatttagcggccgcgaattcgcccttcgcagagaccaaagttcaactgaaacgaattaaacggtttattgattaacaagcaattacagattacgagtcaggtatctggtgccaatggggcgaggctctgaatacacaccattagtgtccacagtaaagtccacattaacagatttgttgtagttggaagtgtactggatctcgggattccagcgtttgctgttctccttctgtagctcccactcgatctccacgctgacccgccccgtggaatactgtgtgatgaaggaagcaaactttgccgcactgaaggtggtcgaaggattcgcaggtaccggggtgtttttgatgagaatctgtggaggagggtgtttaagtccgaatccgcccatgaggggagaggggtgaaaatgtccgtccgtgtgcggaatctttgcccagataggcccctgcaggtacacgtctctgtcctgccagaccatgcctggaagaacgccttgtgtgttgacatctgcagtagatgcttgtgtgttgccgctctggaggttggtagatacagaaccatactgctccgtggccacgggattggtggttctgatttcctcttcgtctgtaatcatgaccttttcaatgtccacatttgttttctctgatccttgttttccaaagatgagaaccccgctctgaggaaaaaacttttcttcatcgtccttgtggctggccattgccgggcccggattcaccagagagtctctgccattgaggtggtacttggtagctccaatccacgagtattcactgttgttgttgtccgcagatgtctttgatactcgctgctggcggtaacagggtccaggaagccagttcctagactgatcccgaatgtcactcgctccggcctgagaaaactgaagcctggactgcgtggtggttccgcttggagtgtttgttctgctcaagtaatacaggtactggtcgatgagaggattcatgagacggtccaaactctggctgtgagcgtagctgctgtggaaaggaacatcctcaaaggtgtagctgaaggtaaagttgtttccggtacgcagcatctgagaagggaagtactccaggcagtaaaatgaagagcgtcctactgcctgactcccgttgttcagggtgaggtatccatactgtggcaccatgaagacgtctgctgggaacggcgggaggcatccttgatgcgccgagccgaggacgtacgggagctggtactccgagtcagtaaacacctgaaccgtgctggtaaggttattggcaatcgtcgtcgtaccatcattctgcgtgacctctctgacttgaatgttaaagagcttgaagttgagtctcttgggccggaatccccagttgttgttgatgagtctttgccagtcacgtggtgaaaagtggcagtggaatctgttgaagtcaaaatacccccaaggggtgctgtagccaaagtagtggttgtcgttgctggctcctgattggctggaaatctgcttgtacagatggttgttgtaggtgggcagagcccaggttcgggtgctggtggtgatgactctgtcgcccatccatgtggaatcgcaatgccaatttcccgaggaattacccactccgtcggcgccatcgttattgtctgccattggtgcgccactgcctgtagccatcgtattagttcccagaccagagggggctgctggtggctgtccgagaggctgggggtcaggtacggagtctgcgtctccagtctgaccgaaattcaatctctttcttgcaggctggttgcccgcttttccggttcccgaggaggagtctggctccacaggagagtgctctaccggcctcttttttcccggagccgtcttaacaggctcctcaaccaggcccagaggttcaagaaccctcttttttgcctggaagactgctcgtccgaggttgcccccaaaagacgtatcttctttaaggcgctcctgaaactccgcgtcggcgtggtcgtacttgaggtacgggttgtctccgctgtcgagctgccggtcgtaggccttgtcgtgctcgagggccgcggcgtctgcctcgttgaccggctctcccttgtcgagtccgttgaagggtccgaggtacttgtacccaggaagcacaagacccctgctgtcgtccttatgccgctctgcgggctttggtggtggtgggccaggtttgagcttccaccactgtcttattccttcagagagagtgtcctcgagccaatctggaagataaccatcggcagccatacctgatttaaatcatttattgttcagagatgcagtcatccaaatccacattgaccagatcgcaggcagtgcaagcgtctggcacctttcccatgatatgatgaatgtagcaaagtttctgatacgcctttttgacgacagaaacgggttgagattctgacacgggaaagcactctaaacagtctttctgtccgtgagtgaagcagatatttgaattctgattcattctctcgcattgtctgcagggaaacagcatcagattcatgcccacgtgacgagaacatttgttttggtacctgtccgcgtagttgatcgaagcttccgcgtctgacgtcgatggctgcgcaactgactcgcgcgcccgtttgggctcacttatatctgcgtcactgggggcgggtcttttcttggctccaccctttttgacgtagaattcatgctccacctcaaccacgtgatcctttgcccaccggaaaaagtctttcacttcctgcttggtgaccttcccaaagtcatgatccagacggcgggttagttcaaatttgaacatccggtcttgcaacggctgctggtgttcgaaggtcgttgagttcccgtcaatcacggcgcacatgttggtgttggaggtggcgatcacgggagtcgggtctatctgggccgaggacttgcacttttggtccacgcgcaccttgcttcctccgagaatggcttcggccgattccacgaccttggcggtcatctttccctcctcccaccagatcaccatcttgtcgacacagtcgttgaagggaaagttctcattggtccagttgacgcagcaagggcgaattcgtttaaacctgcaggaactagtcccttagtgagg

SEQ ID NO: 207 - protein, 735 aa, synthetic construct
  REGION 1..735: note = source = /note="Description of Artificial Sequence: Synthetic polypeptide"
MAADGYLPDWLEDTLSEGIRQWWKLKPGPPPPKPAERHKDDSRGLVLPGYKYLGPFNGLYKGEPVNEADAAALEHDKAYDRQLDSGDNPYLKYNHAGAEFQERLKEDTSFGGNLGRAVFQAKKRVLEPLGLVEEPVKTAPGKKRPVEHSPVEPDSSSGTGKAGNQPARKRLNFGQTGDADSVPDPQPLGQPPAAPSGLGSTTMATGSGAPVADNNEGADGVGNSSGNWHCDSQWLGDRVITTSTRTWALPTYNNHLYKQISSQSGASNDNHYFGYSTPWGYFDFNRFHCHFSPRDWQRLINNNWGFRPKRLNFKLFNIQVKEVTQNDGTTTIANNLTSTVQVFTDSEYQLPYVLGSAHQGCLPPFPADVFMVPQYGYLTLNNGSQAVGRSSFYCLEYFPSQMLRTGNNFQFSYTFEDVPFHSSYAHSQSLDRLMNPLIDQYLYYLNKTQSNSGTLQQSRLLFSQAGPTSMSLQAKNWLPGPCYRQQRLSKQANDNNNSNFPWTAATKYHLNGRDSLVNPGPAMASHKDDEEKFFPMHGTLIFGKQGTNANDADLDNVMITDEEEIRTTNPVATEQYGYVSNNLQDSNTGPTTGTVNHQGALPGMVWQDRDVYLQGPIWAKIPHTDGHFHPSPLMGGFGLKHPPPQIMIKNTPVPANPPTNFSSAKFASFITQYSTGQVSVEIEWELQKENSKRWNPEIQYTSNYNKSVNVDFTVDTNGVYSEPRPIGTRYLTRNL

SEQ ID NO: 208 - DNA, 2208 bp, synthetic construct
  misc_feature 1..2208: note = source = /note="Description of Artificial Sequence: Synthetic polynucleotide"
  source 1..2208: mol_type = other DNA
atggctgccgatggttatcttccagattggctcgaggacactctctctgaaggaataagacagtggtggaagctcaaacctggcccaccaccgccaaagcccgcagagcggcataaggacgacagcaggggtcttgtgcttcctgggtacaagtacctcggacccttcaacggactctacaagggagagccggtcaacgaggcagacgccgcggccctcgagcacgacaaggcctacgaccggcagctcgacagcggagacaacccgtacctcaagtacaaccacgccggcgcggagtttcaggagcgccttaaagaagatacgtcttttgggggcaacctcggacgagcagtcttccaggccaaaaagagggttcttgaacctctgggcttggttgaggagcctgttaaaacggctccgggaaaaaagaggccggtagagcactctcctgtggagccagactcctcctcgggaaccggaaaagcgggcaaccagcctgcaagaaaaagattgaattttggtcagactggagacgcagactccgtacctgacccccagcctctcggacagccaccagcagccccctctggtctgggatctactacaatggctacaggcagtggcgcaccagtggcagacaataacgagggtgccgatggagtgggtaattcctcaggaaattggcattgcgattcccaatggctgggcgacagagtcatcaccaccagcacccgaacctgggctctgcccacctacaacaaccacctctacaagcaaatctccagccaatcaggagcctcaaacgacaaccactactttggctacagcaccccctgggggtattttgacttcaacagattccactgccacttttcaccacgtgactggcaaagactcatcaacaacaactggggattccgaccaaagagactcaacttcaagctctttaacattcaagtcaaagaggtcacgcagaatgacggtacgacgacgattgccaataaccttaccagcacggttcaggtgtttactgactcggagtaccagctcccgtacgtcctcggctcggcgcatcaaggatgcctcccgccgttcccagcagacgtcttcatggtgccacagtatggatacctcaccctgaacaacgggagtcaggcggtaggacgctcttccttttactgcctggagtactttccttctcagatgctgcgtactggaaacaactttcagttcagctacacctttgaagacgttcctttccacagcagctacgctcacagccagagtctggatcggctgatgaatcctctgatcgaccagtacctgtattatctgaacaagacacaatcaaatagtggaacccttcagcagtctcggctactgtttagccaagctggacccaccagcatgtctcttcaagctaaaaactggctgcctggaccttgctacagacagcagcgtctgtcaaagcaggcaaacgacaacaacaacagcaactttccctggactgcggctacaaagtatcatctaaatggccgggactcgttggttaatccaggaccagctatggccagccacaaagacgatgaagaaaagtttttccccatgcatggaaccctgatatttggtaaacaaggaacaaatgctaacgacgcggatttggacaatgtcatgattacagatgaagaagaaatccgcaccaccaatcccgtggctacggagcagtacggatatgtgtcaaataatttgcaagactcaaatactggtccaactactggaactgtcaatcaccaaggagcgttacctggtatggtgtggcaggatcgagacgtgtacctgcagggacccatttgggccaagattcctcacaccgatggacactttcatccttctccacttatgggaggttttggactcaaacacccacctcctcagatcatgattaaaaacactcccgttccagccaatcctcccacaaacttcagttctgccaagtttgcttctttcatcacacagtattccacgggacaagtcagcgtagagatcgagtgggagctgcagaaggagaacagcaaacgctggaaccccgagatccagtacacttccaactataacaaatctgttaatgtggactttactgtggacactaatggtgtgtattcagagcctcgccccattggcaccagatacctgactcgtaatctgtaa

SEQ ID NO: 209 - protein, 738 aa, synthetic construct
  REGION 1..738: note = source = /note="Description of Artificial Sequence: Synthetic polypeptide"
MAADGYLPDWLEDNLSEGIREWWDLKPGAPKPKANQQKQDDGRGLVLPGCKYLGPFNGLDKGEPVNAADAAALEHDKAYDQQLKAGDNPYLRYNHADAEFQERLQEDTSFGGNLGRAVFQAKKRVLEPLGLVEEGAKTAPGKKRPVEPSPQRSPDSSTGIGKTGQQPAKKRLNFGQTGDSESVPDPQPIGEPPAGPSGLGSGTMAAGGGAPMADNNEGADGVGSSSGNWHCDSTWLGDRVITTSTRTWALPTYNNHLYKQISNGTSGGSTNDNTYFGYSTPWGYFDFNRFHCHFSPRDWQRLINNNWGFRPKRLNFKLFNIQVKEVTQNEGTKTIANNLTSTIQVFTDSEYQLPYVLGSAHQGCPPPFPADVFMIPQYGYLTLNNGSQAVGRSSFYCLEYFPSQMRRTGNNFEFSYQFEDVPFHSSYAHSQSLDRLMNPLIDQYLYYLSRTQSTGGTAGTQQLLFSQAGPNNMSAQAKNWLPGPCYRQQRVSTTLSQNNNSNFAWTGATKYHLNGRDSLVNPGVAMATHKDDEERFFPSSGVLMFGKQGAGKDNVDYSSVMLTSEEEIKTTNPVATEQYGVVADNLQQQNAAPIVGAVNSQGALPGMVWQNRDVYLQGPIWAKIPHTDGNFHPSPLMGGFGLKHPPPQILIKNTPVPADPPTTFSQAKLASFITQYSTGQVSVEIEWELQKENSKRWNPEIQYTSNYNKSVNVDFTVDTNGVYSEPRPIGTRYLTRNL

SEQ ID NO: 210 - DNA, 2217 bp, synthetic construct
  misc_feature 1..2217: note = source = /note="Description of Artificial Sequence: Synthetic polynucleotide"
  source 1..2217: mol_type = other DNA
atggctgccgatggttatcttccagattggctcgaggacaacctctctgagggcattcgcgagtggtgggacttgaaacctggagccccgaaacccaaagccaaccagcaaaagcaggacgacggccggggtctggtgcttcctggctgcaagtacctcggacccttcaacggactcgacaagggggagcccgtcaacgcggcggacgcagcggccctcgagcacgacaaggcctacgaccagcagctcaaagcgggtgacaatccgtacctgcggtataaccacgccgacgccgagtttcaggagcgtctgcaagaagatacgtcttttgggggcaacctcgggcgagcagtcttccaggccaagaagcgggttctcgaacctctcggtctggttgaggaaggcgctaagacggctcctggaaagaagagaccggtagagccatcaccccagcgttctccagactcctctacgggcatcggcaagacaggccagcagcccgcgaaaaagagactcaactttgggcagactggcgactcagagtcagtgcccgaccctcaaccaatcggagaaccccccgcaggcccctctggtctgggatctggtacaatggctgcaggcggtggcgctccaatggcagacaataacgaaggcgccgacggagtgggtagttcctcaggaaattggcattgcgattccacatggctgggcgacagagtcatcaccaccagcacccgaacctgggccctccccacctacaacaaccacctctacaagcaaatctccaacgggacatcgggaggaagcaccaacgacaacacctacttcggctacagcaccccctgggggtattttgactttaacagattccactgccacttctcaccacgtgactggcagcgactcatcaacaacaactggggattccggcccaagagactcaacttcaagctcttcaacatccaggtcaaggaggtcacgcagaatgaaggcaccaagaccatcgccaataaccttaccagcacgattcaggtctttacggactcggaataccagctcccgtacgtcctcggctctgcgcaccagggctgcccgcctccgttcccggcggacgtcttcatgattcctcagtacgggtacctgactctgaacaacggcagtcaggccgtgggccgttcctccttctactgcctggagtactttccttctcaaatgcggagaacgggcaacaactttgagttcagctaccagtttgaggacgtgccttttcacagcagctacgcgcatagccaaagcctggaccggctgatgaaccccctcatcgaccagtacctgtactacctgtctcggactcagtccacgggaggtaccgcaggaactcagcagttgctattttctcaggccgggcctaataacatgtcggctcaggccaaaaactggctacccgggccctgctaccggcagcaacgcgtctccacgacactgtcgcaaaataacaacagcaactttgcttggaccggtgccaccaagtatcatctgaatggcagagactctctggtaaatcccggtgtcgctatggcaacgcacaaggacgacgaagagcgattttttccatccagcggagtcttgatgtttgggaaacagggagctggaaaagacaacgtggactatagcagcgttatgctaaccagtgaggaagaaatcaaaaccaccaacccagtggccacagaacagtacggcgtggtggccgataacctgcaacagcaaaacgccgctcctattgtaggggccgtcaacagtcaaggagccttacctggcatggtctggcagaaccgggacgtgtacctgcagggtcctatctgggccaagattcctcacacggacggcaactttcatccttcgccgctgatgggaggctttggactgaaacacccgcctcctcagatcctgattaagaatacacctgttcccgcggatcctccaactaccttcagtcaagccaagctggcgtcgttcatcacgcagtacagcaccggacaggtcagcgtggaaattgaatgggagctgcagaaagagaacagcaagcgctggaacccagagattcagtatacttccaactataacaaatctgttaatgtggactttactgtggacactaatggtgtgtattcagagcctcgccccattggcaccagatacctgactcgtaatctgtaa

SEQ ID NO: 211 - DNA, 3167 bp, synthetic construct
  misc_feature 1..3167: note = source = /note="Description of Artificial Sequence: Synthetic polynucleotide"
  source 1..3167: mol_type = other DNA
attgaatttagcggccgcgaattcgcccttcgcagagaccaaagttcaactgaaacgaattaaacggtttattgattaacaagcaattacagattacgagtcaggtacctggtgccaatggggcgaggctctgaatacacaccattagtgtccacagtaaagtccacattaacagatttgttgtagttggaagtgtactgaatctcgggattccagcgtttgctgttctccttctgcagctcccactcgatctccacgctgacctgccccgtggagtactgtgtaatgaaggaagcaaactttgccgcactgaaggtagtcgaaggattcgcaggtaccggggtgttcttgatgagaatctgcgggggagggtgtttaagtccgaatccgcccatgaggggagaggggtgaaaatgtccgtccgtgtgtggaatctttgcccagatgggcccctgcaggtacacgtctctgtcctgccacaccatgcctggaagaacgccttgtgtgttgacatctgaggtagctgcttgtgtgttgccgctctggaggttggtagatacagaaccatactgctccgtagccacgggattggtggtcctgatttcctcttcgtctgtaatcatgaccttttcaatgtccacattagtttttcccgagtcttgttttccaaagatgagaaccccgctctgaggaaaaaacttttcttcatcgtccttgtggctggccatggccgggcccggattcaccagagagtctcttccattaaggtggtacttggtagctccagtccacgagtattcactgttgttgttatccgcagatgtctttgatactcgctgctggcggtaacagggtccaggaagccagttcctagactggtcccgaatgtcacttgctccggcctgagaaaactgaagccttgactgcgtggtggttccgcttggagtgtttgttctgctcaagtaatacaggtactggtcgatgagaggattcatgagacggtccaaactctggctgtgggcgtagctgctgtggaaaggaacgtcctcaaaggtgtagctgaaggtaaagttgtttccggtacgcagcatctgagaaggaaagtactccaggcagtaaaatgaagagcgtcctactgcctgactcccgttgttcagggtgaggtatccatactgtggcaccatgaagacgtctgctgggaacggcgggaggcatccttgatgcgccgagccgaggacgtacgggagctggtactccgagtcagtaaacacctgaaccgtgctggtaaggttattggcaatcgtcgtcgtaccgtcattctgcgtgacctccttgacttgaatgttaaagagcttgaagttgagtcttttgggccggaatccccaattgttgttgatgagtctttgccagtcacgtggcgaaaagtggcagtggaatctgttgaagtcaaaatacccccaaggggtgctgtagccaaagtagtggttgtcgtttgaggctcctgattggctggaaatctgcttgtagaggtggttgttgtaggtgggcagagcccaggtgcgggtgctggtggtgatgactctgtcgcccatccatgtggaatcgcaatgccaatttcccgaggaattacccactccgtcggcgccctcgttattgtctgccattggtgcgccactgcctgtagccatcgtattagttcccagaccagagggggctgctggtggctgtccgagaggctgggggtcaggtacggagtctgcgtctccagtctgaccgaaattcaatctctttcttgcaggctgctggcccgcttttccggttcccgaggaggagtctggctccgcaggagagtgctctaccggcctcttttttcccggagccgtcttaacaggttcctcaaccaggcccagaggttcaagaaccctctttttcgcctggaagactgctcgtccgaggttgcccccaaaagacgtatcttctttaagacgctcctggaactccgcgtcggcgtggttgtacttggggtacgggttgtctccgctgtcgagctgccggtcgtaggccttgtcgtgctcgagggccgcggcgtctgcctcgttgaccggctctcccttgtcgagtccgttgaagggtccaaggtacttgtacccaggaagcacaagacccctgctgtcgtccttatgccgctctgcgggctttggtggtggtgggccaggtttgagcttccaccactgtcttattccttcagagagagtgtcctcgagccaatctggaagataaccatcggcagccatacctgatttaaatcatttattgttcagagatgcagtcatccaaatccacattgaccagatcgcaagcagtgcaagcgtctggcacctttcccatgatatgatgaatgtagcacagtttctgatacgcctttttgacgacagaaacgggttgagattctgacacgggaaagcactctaaacagtctttctgtccgtgagtgaagcagatatttgaattctgattcattctctcgcattgtctgcagggaaacagcatcagattcatgcccacgtgacgagaacatttgttttggtacctgtccgcgtagttgattgaagcttccgcgtctgacgtcgatggctgcgcaactgactcgcgcgcccgtttgggctcacttatatctgcgtcactgggggcgggtctttttttggctccaccctttttgacgtagaattcatgctctacctcaaccacgtgatcctttgcccaccggaaaaagtctttgacttcctgcttggtgaccttcccaaagtcatgatccagacggcgggtgagttcaaatttgaacatccggtcttgcaacggctgctggtgttcgaaggtcgttgagttcccgtcaatcactgcgcacatgttggtgttggaggtgacaatcacgggagtcgggtctatctgggccgaggacttgcatttctggtccacgcgcaccttgcttcctccgagaatggctttggccgactccacgaccttggcggtcatcttcccctcctcccaccagatcaccatcttgtcgacgcaatcattgaaaggaaagttctcattggtccagttgacgcagccgtagaaagggcgaattcgtttaaacctgcaggactagtccctttagtgagggt

SEQ ID NO: 212 - DNA, 3161 bp, synthetic construct
  misc_feature 1..3161: note = source = /note="Description of Artificial Sequence: Synthetic polynucleotide"
  source 1..3161: mol_type = other DNA
aattgaatttagcggccgcgaattcgcccttcgcagagaccaaagttcaactgaaacgaattaaacggtttattgattaacaagcaattacagattacgagtcaggtatctggtgccaatggggcgaggctctgaatacacaccattagtgtccacagtaaagtccacattaacagatttgttgtagttggaagtgtactgaatctcgggattccagcgtttgctgttctccttctgcagctcccactcgatctccacgctgacctgccccgtggagtactgtgtaatgaaggaagcaaactttgccgcactgaaggtagtcgaaggattcgcaggtaccggggtgttcttgatgagaatctgcgggggagggtgtttaagtccgaatccgcccatgaggggagaggggtgaaaatgtccgtccgtgtgtggaatctttgcccagatgggcccctgcaggtacacgtctctgtcctgccacaccatgcctggaagaacgccttgtgtgttgacatctgaggtagctgcttgtgtgttgccgctctggaggttggtagatacagaaccatactgctccgtagccacgggattggtggtcctgatttcctcttcgtctgtaatcatgaccttttcaatgtccacattagtttttcccgagtcttgttttccaaagatgagaaccccgctctgaggaaaaaacttttcttcatcgtccttgtggctggccatggccgggcccggattcaccagagagtctcttccattaaggtggtacttggtagctccagtccacgagtattcactgttgttgttatccgcagatgtctttgatactcgctgctggcggtaacagggtccaggaagccagttcctagactggtcccgaatgtcacttgctccggcctgagaaaactgaagccttgactgcgtggtggttccgcttggagtgtttgttctgctcaagtaatacaggtactggtcgacgagaggattcatgagacggtccaaactctggctgtgggcgtagctgctgtggaaaggaacgtcctcaaaggtgtagctgaaggtaaagttgtttccggtacgcagcatctgagaaggaaagtactccaggcagtaaaatgaagagcgtcctactgcctgactcccgttgttcagggtgaggtatccatactgtggcaccatgaagacgtctgctgggaacggcgggaggcatccttgatgcgccgagccgaggacgtacgggagctggtactccgagtcagtaaacacctgaaccgtgctggtaaggttattggcaatcgtcgtcgtaccgtcattctgcgtgacctccttgacttgaatgttaaagagcttgaagttgagtcttttgggccgggatccccaattgttgttgatgagtctttgccagtcacgtggcgaaaagtggcagtggaatctgttgaagtcaaaatacccccaaggggtgctgtagccaaagtagtggttgtcgtttgaggctcctgattggctggaaatctgcctgtagaggtggttgttgtaggtgggcagagcccaggtgcgggtgctggtggtgatgactctgtcgcccatccatgtggaatcgcaatgccaatttcccgaggaattacccactccgtcggcgccctcgttattgtctgccattggtgcgccactgcctgtagccatcgtattagttcccagaccagagggggctgctggtggctgtccgagaggctgggggtcaggtacggagtctgcgtctccagtctgaccgaaattcaatctccttcttgcaggctgctggcccgcttttccggttcccgaggaggagtctggctccgcaagagagtgctctaccggcctcttttttcccggagccgtcttaacaggttcctcaaccaggcccagaggttcaagaaccctctttttcgcctggaagactgctcgtccgaggttgcccccaaaagacgtatcttctttaagacgctcctggaactccgcgtcggcgtggttgtacttgaggtacgggttgtctccgccgtcgagctgccggtcgtaggccttgtcgtgctcgagggccgcggcgtctgcctcgttgaccggctctcccttgtcgagtccgttgaagggtccaaggtacttgtacccaggaagcacaagacccctgctgtcgtccttatgccgctctgcgggctttggtggtggtgggccaggtttgagcttccaccactgtcttattccttcagagagagtgtcctcgagccaatctggaagataaccatcggcagccatacctgatttaaatcatttattgttcagagatgcagtcatccaaatccacattgaccagatcgcaagcagtgcaagcgtctggcacctttcccatgatatgatgaatgtagcacagtttctgatacgcctttttgacgacagaaacgggttgagattctgacacgggaaagcactctaaacagtctttctgtccgtgagtgaagcagatatttgaattctgattcattctctcgcattgtctgcagggaaacagcatcagattcatgcccacgtgacgagaacatttgttttggtacctgtccgcgtagttgattgaagcttccgcgtctgacgtcgatggctgcgcaactgactcgcgcgcccgtttgggctcacttatatctgcgtcactgggggcgggtctttttttggctccaccctttttgacgtagaattcatgctctacctcaaccacgtgatcctttgcccaccggaaaaagtctttgacttcctgcttggtgaccttcccaaagtcatgatccagacggcgggtgagttcaaatttgaacatccggtcttgcaacggctgctggtgttcgaaggtcgttgagttcccgtcaatcactgcgcacatgttggtgttggaggtgacaatcacgggagtcgggtctatctgggccgaggacttgcatttctggtccacgcgcaccttgcttcctccgagaatggctttggccgactccacgaccttggcggtcatcttcccctcctcccaccagatcaccatcttgtcgacgcaatcattgaaaggaaagttctcattggtccagttgacgcagcaagggcgaattcgtttaaacctgcaggactagtccctttagtgaggg

SEQ ID NO: 213 - DNA, 3172 bp, synthetic construct
  misc_feature 1..3172: note = source = /note="Description of Artificial Sequence: Synthetic polynucleotide"
  source 1..3172: mol_type = other DNA
gattgaatttagcggccgcgaattcgcccttgctgcgtcaactggaccaatgagaactttcccttcaacgattgcgtcgacaagatggtgatctggtgggaggagggcaagatgaccgccaaggtcgtggagtccgccaaggccattctgggtggaagcaaggtgcgcgtggaccaaaagtgcaagtcatcggcccagatcgaccccacgcccgtgatcgtcacctccaacaccaacatgtgcgccgtgatcgacgggaacagcaccaccttcgagcaccagcagcccctgcaggaccgcatgttcaagttcgagctcacccgccgtctggagcacgactttggcaaggtgaccaagcaggaagtcaaagagttcttccgctgggctcaggatcacgtgactgaggtggcgcatgagttctacgtcagaaagggcggagccaccaaaagacccgcccccagtgacgcggatataagcgagcccaagcgggcctgcccctcagttgcggagccatcgacgtcagacgcggaagcaccggtggactttgcggacaggtaccaaaacaaatgttctcgtcacgcgggcatgcttcagatgctgtttccctgcaagacatgcgagagaatgaatcagaatttcaacgtctgcttcacgcacggggtcagagactgctcagagtgcttccccggcgcgtcggaatctcaacccgtcgtcagaaaaaagacgtatcagaaactgtgcgcgattcatcatctgctggggcgggcacccgagattgcgtgttcggcctgcgatctcgtcaacgtggacttggatgactgtgtttctgagcaataaatgacttaaaccaggtatggctgctgacggttatcttccagattggctcgaggacaacctctctgagggcattcgcgagtggtgggacctgaaacctggagcccccaagcccaaggccaaccagcagaagcaggacgacggccggggtctggtgcttcctggctacaagtacctcggacccttcaacggactcgacaagggggagcccgtcaacgcggcggacgcagcggccctcgagcacgacaaggcctacgaccagcagctcaaagcgggtgacaatccgtacctgcggtataaccacgccgacgccgagtttcaggagcgtctgcaagaagatacgtcttttgggggcaacctcgggcgagcagtcttccaggccaagaagcgggttctcgaacctctcggtctggttgaggaagctgctaagacggctcctggaaagaagagaccggtagaaccgtcacctcagcgttcccccgactcctccgcgggcatcggcaagaaaggccagcagcccgctaaaaagagactgaactttggtcagactggcgactcagagtcagtccccgaccctcaaccaatcggagaaccaccagcaggcccctctggtctgggatctggtacaatggctgcaggcggtggcgctccaatggcagacaataacgaaggcgccgacggagtgggtagttcctcaggaaattggcattgcgattccacatggctgggcgacagagtcatcaccaccagcacccgaacctgggccctgcccacctacaacaaccacctctacaagcaaatatccaatgggacatcgggaggaagcaccaacgacaacacctacttcggctacagcaccccctgggggtattttgacttcaacagattccactgccacttctcaccacgtgactggcagcgactcatcaacaacaactggggattccggccaaaaagactcagcttcaagctcttcaacatccaggtcaaggaggtcacgcagaatgaaggcaccgagaccatcgccaataaccttaccagcacgattcaggtatttacggactcggaataccagctgccgtacgtcctcggctccgcgcaccagggctgcctgcctccgttcccggcggacgtcttcatgattccccagtacggctaccttacactgaacaatggaagtcaagccgtaggccgttcctccttctactgcctggaatattttccatctcaaatgctgcgaactggaaacaattttgaattcagctacaccttcgaggacgtgcctttccacagcagctgcgcacacagccagagctcggaccgactgatgaatcctctcatcgaccagtacctgtactacttatccagaactcggtccacaggaggaactcaaggtacccagcaattgttattttctcaagctgggcctgcaaacatgtcggctcaggctaagaactggctacctggaccttgctaccggcagcagcgagtctctacgacactgtcgcaaaacaacaacagcaactttgcttggactggtgccaccaaatatcacctgaacggaagagactctttggtaaatcccggtgtcgccatggcaacccacaaggacgacgaggaacgcttcttcccgtcgagtggagtcctgatgtttggaaaacagggtgctggaagagacaatgtggactacagcagcgttatgctaaccagcgaagaagaaattaaaaccactaaccctgtagccacagaacaatacggtgtggtggctgacaacttgcagcaaaccaatacagggcctattgtgggaaatgtcaacagccaaggagccttacctggcatggtctggcagaaccgagacgtgtacctgcagggtcccatctgggccaagattcctcacacggacggcaacttccacccttcaccgctaatgggaggatttggactgaagcacccacctcctcagatcctgatcaagaacacgccggtacctgcggatcctccaacaacgttcagccaggcgaaattggcttccttcattacgcagtacagcaccggacaggtcagcgtggaaatcgagtgggagctgcagaaggagaacagcaaacgctggaacccagagattcagtacacttcaaactactacaaatctacaaatgtggactttgctgtcaatacagagggaacttattctgagcctcgccccattggtactcgttacctcacccgtaatctgtaattgctggttaatcaataaaccgtttgattcgtttcagttgaactttggtctctgcgaagggcgaattcgtttaaacctgcaggactagtccctttagtgagg

SEQ ID NO: 214 - DNA, 3172 bp, synthetic construct
  misc_feature 1..3172: note = source = /note="Description of Artificial Sequence: Synthetic polynucleotide"
  source 1..3172: mol_type = other DNA
gattgaatttagcggccgcgaattcgcccttgctgcgtcaactggaccaatgagaactttcccttcaacgattgcgtcgacaagatggtgatctggtgggaggagggcaagatgaccgccaaggtcgtggagtccgccaaggccattctgggtggaagcaaggtgcgcgtggaccaaaagtgcaagtcatcggcccagatcgaccccacgcccgtgatcgtcacctccaacaccaacatgtgcgccgtgatcggcgggaacagcaccaccttcgagcaccagcagcccctgcaggaccgcatgttcaagttcgagctcacccgccgtctggagcacgactttggcaaggtgaccaagcaggaagtcaaagagttcttccgctgggctcaggatcacgtgactgaggtggcgcatgagttctacgtcagaaagggcggagccaccaaaagacccgcccccagtgacgcggatataagcgagcccaagcgggcctgcccctcagttgcggagccatcgacgtcagacgcggaagcaccggtggactttgcggacaggtaccaaaacaaatgttctcgtcacgcgggcatgcttcagatgctgtttccctgcaagacatgcgagagaatgaatcagaatttcaacgtctgcttcacgcacggggtcagagactgctcagagtgcctccccggcgcgtcagaatctcaacccgtcgtcagaaaaaagacgtatcagaaactgtgcgcgattcatcatctgctggggcgggcacccgagattgcgtgttcggcctgcgatctcgtcaacgtggacttggatgactgtgtttctgagcaataaatgacttaaaccaggtatggctgctgacggttatcttccagattggctcgaggacaacctctctgagggcattcgcgagtggtgggacctgaaacctggagcccccaagcccaaggccaaccagcagaagcaggacgacggccggggtctggtgcttcttggctacaagtacctcggacccttcaacggactcgacaagggggagcccgtcaatgcggcggacgcagcggccctcgagcacgacaaggcctacgaccagcagctcaaagcgggtgacaatccgtacctgcggtataaccacgccgacgccgagtttcaggagcgtctgcaagaagatacgtcttttgggggcaacctcgggcgagcagtcttccaggccaagaagcgggttctcgaacctctcggtctggttgaggaagctgctaagacggctcctggaaagaagagaccggtagaaccgtcacctcagcgttcccccgactcctccacgggcatcggcaagaaaggccagcagcccgctaaaaagagactgaactttggtcagactggcgactcagagtcagtccccgaccctcaaccaatcggagaaccaccagcaggcccctctggtctgggatctggtacaatggctgcaggcggtggcgctccaatggcagacaataacgaaggcgccgacggagtgggtagttcctcaggaaattggcattgcgattccacatggctgggcgacagagtcatcaccaccagcacccgaacctgggccctgcccacctacaacaaccacctctacaagcaaatatccaatgggacatcgggaggaagcaccaacgacaacacctacttcggctacagcaccccctgggggtattttgacttcaacagattccactgccacttctcaccacgtgactggcagcgactcatcaacaacaactggggattccggccaaaaagactcagcttcaagctcttcaacatccaggtcaaggaggtcacgcagaatgaaggcaccaagaccatcgccaataaccttaccagcacgattcaggtatttacggactcggaataccagctgccgtacgtcctcggctccgcgcaccagggctgcctgcctccgttcccggcggacgtcttcatgattccccagtacggctaccttacactgaacaatggaagtcaagccgtaggccgttcctccttctactgcctggaatattttccatctcaaatgctgcgaactggaaacaattttgaattcagctacaccttcgaggacgtgcctttccacagcggctacgcacacagccagagcttggaccgactgatgaatcctctcatcgaccagtacctgtactacttatccagaactcagtccacaggaggaactcaaggtacccagcaattgttattttctcaagctgggcctgcaaacatgtcggctcaggctaagaactggctacctggaccttgctaccggcagcagcgagtctctacgacactgtcgcaaaacaacaacagcaactttgcttggactggtgccaccaaatatcacctgaacggaagagactctttggtaaatcccggtgtcgccatggcaacccacaaggacgacgaggaacgcttcttcccgtcgagtggagtcctgatgtttggaaaacagggtgctggaagagacaatgtggactacagcagcgttatgctaaccagcgaagaagaaattaaaaccactaaccctgtagccacagaacaatacggtgtggtggctgacaacttgcagcaaaccaatacagggcctattgtgggaaatgtcaacagccaaggagccttacctggcatggtctggcagaaccgagacgtgtacctgcagggtcccatctgggccaagattcctcacacggacggcaacttccacccttcaccgctaatgggaggatttggactgaagcacccacctcctcagatcctgatcaagaacacgccggtacctgcggatcctccaacgacgttcagccaggcgaaattggcttccttcattacgcagtacagcaccggacaggtcagcgtggaaatcgagtgggagctgcagaaggagaacagcaaacgctggaacccagagattcagtacacttcaaactactacaaatctacaaatgtggactttgctgtcaatacagagggaacttattctgagcctcgccccattggtactcgttacctcacccgtaatctgtaattgctggttaatcaataaaccgtttgattcgtttcagttgaactttggtctctgcgaagggcgaattcgtttaaacctgcaggactagtccctttagtgagg

SEQ ID NO: 215 - DNA, 2208 bp, synthetic construct
  misc_feature 1..2208: note = source = /note="Description of Artificial Sequence: Synthetic polynucleotide"
  source 1..2208: mol_type = other DNA
atggctgccgatggttatcttccagattggctcgaggacactctctctgaaggaataagacagtggtggaagctcaaacctggcccaccaccaccaaagcccgcagagcggcataaggacgacagcaggggtcttgtgcttcctgggtacaagtacctcggacccttcaacggactcgacaagggagagccggtcaacgaggcagacgccgcggccctcgagcacgacaaggcctacgaccggcagctcgaaagcggagacaacccgtacctcaagtacaaccacgccgacgcggagtttcaggagcgtcttaaagaagatacgtcttttgggggcaacctcggacgagcagtcttccaggcgaaaaagagggttcttgaacctctgggcctggttgaggagcctgttaaaacggctccgggaaaaaagaggccggtagagcactctcctgtggagccagactcctcctcgggaaccggaaaagcgggccagcagcctgcgagaaaaagattgaattttggtcagactggagacgcagactccgtacctgacccccagcctctcggacagccaccagcagccccctctggtctgggatctactacaatggcttcaggcagtggcgcaccagtggcagacaataacgagggtgccgatggagtgggtaattcctcaggaaattggcattgcgattcccaatggctgggcgacagagtcatcaccaccagcacccgaacctgggccctgcccacctacaacaaccacctctacaagcaaatctccagccaatcaggagcctcaaacgacaaccactactttggctacagcaccccctgggggtattttgacttcaacagattccactgccacttttcaccacgtgactggcaaagactcatcaacaacagctggggattccgacccaaaagactcaacttcaagctctttaacattcaagtcaaagaggtcacgcagaatgacggtacgacgacgattgccaataaccttaccagcacggttcaagtgtttaccgactcggagtaccagctcccgtacgtcctcggctcggcgcatcaaggatgcctcccgccgttcccagcagacgtctttatggtcccacagtatggatacctcaccctgaacaacgggagtcaggcggtaggacgctcttccttttactgcctggagtactttccttctcagatgctgcgtactggaaacaactttcagttcagctacacctttgaagacgttcccttccacagcagctacgctcacagccagagtctggatcggctgctgaatcctctgatcgaccagtacctatattatctgaacaagacacaatcaaatagtggaactcttcagcagtctcggctactgtttagccaagctggacccaccagcatgtctcttcaagctaaaaactggctgcctggaccttgctacagacagcagcgtctgtcaaagcaggcaaacgacaacaacaacagcaactttccctggactgcggctacaaagtatcatctaaatggccgggactcgttggttaatccaggaccagctatggccagccacaaagacgatgaagaaaagtttttccccatgcatggaaccctgatatttggtaaacaaggaacaaatgctaacgacgcggatttggacaatgtcatgattacagatgaagaagaaatccgcaccaccaatcccgtggctacggagcagtacggatatgtgtcaaataatttgcaaaactcaaatactggtccaactactggaactgtcaatcaccaaggagcgttacctggtatggtgtggcaggatcgagacgtgtacctgcagggacccatttgggccaagattcctcacacggacgggcactttcatccttctccactaatgggaggttttgggctcaaacacccgcctcctcagatcatgatcaaaaacactcccgttccagccaatcctcctacaaacttcagttcttccaagtttgcttctttcatcacacagtattccacggggcaggtcagcgtggagatcgagtgggagctgcagaaggagaacagcaaacgctggaatcccgaaattcagtatacttccaactacaacaaatctgttaatgtggactttactgtggacactaatggtgtgtattcagagcctcgccccattggcaccagatacccgactcgtaatctgtaa

SEQ ID NO: 216 - protein, 735 aa, synthetic construct
  REGION 1..735: note = source = /note="Description of Artificial Sequence: Synthetic polypeptide"
MAADGYLPDWLEDTLSEGIRQWWKLKPGPPPPKPAERHKDDSRGLVLPGYKYLGPFNGLDKGEPVNEADAAALEHDKAYDRQLESGDNPYLKYNHADAEFQERLKEDTSFGGNLGRAVFQAKKRVLEPLGLVEEPVKTAPGKKRPVEHSPVEPDSSSGTGKAGQQPARKRLNFGQTGDADSVPDPQPLGQPPAAPSGLGSTTMASGSGAPVADNNEGADGVGNSSGNWHCDSQWLGDRVITTSTRTWALPTYNNHLYKQISSQSGASNDNHYFGYSTPWGYFDFNRFHCHFSPRDWQRLINNSWGFRPKRLNFKLFNIQVKEVTQNDGTTTIANNLTSTVQVFTDSEYQLPYVLGSAHQGCLPPFPADVFMVPQYGYLTLNNGSQAVGRSSFYCLEYFPSQMLRTGNNFQFSYTFEDVPFHSSYAHSQSLDRLLNPLIDQYLYYLNKTQSNSGTLQQSRLLFSQAGPTSMSLQAKNWLPGPCYRQQRLSKQANDNNNSNFPWTAATKYHLNGRDSLVNPGPAMASHKDDEEKFFPMHGTLIFGKQGTNANDADLDNVMITDEEEIRTTNPVATEQYGYVSNNLQNSNTGPTTGTVNHQGALPGMVWQDRDVYLQGPIWAKIPHTDGHFHPSPLMGGFGLKHPPPQIMIKNTPVPANPPTNFSSSKFASFITQYSTGQVSVEIEWELQKENSKRWNPEIQYTSNYNKSVNVDFTVDTNGVYSEPRPIGTRYPTRNL

SEQ ID NO: 217 - DNA, 2208 bp, synthetic construct
  misc_feature 1..2208: note = source = /note="Description of Artificial Sequence: Synthetic polynucleotide"
  source 1..2208: mol_type = other DNA
atggctgccgatggttatcttccagattggctcgaggacactctctctgaaggaataagacagtggtggaagctcaaacctggcccaccaccaccaaagcccgcagagcggcataaggacgacagcaggggtcttgtgcttcctgggtacaagtacctcggacccttcaacggactcgacaagggagagccggtcaacgaggcagacgccgcggccctcgagcacgacaaggcctacgaccggcagctcgacagcggagacaacccgtacctcaagtacaaccacgccgacgcggagtttcaggagcgtcttaaagaagatacgtcttttgggggcaacctcggacgagcagtcttccaggccaaaaagaggattcttgaacctctgggcctggttgaggaacctgttaagacggctccgggagaaaagaggccggtagagcactctcctgcggagccagactcctcctcgggaaccggaaaagcgggccagcagcctgcaagaaagagattgaattttggccagactggagacgcagactcagtacctgacccccagcctctcggacagccaccagcagccccctctggtctgggaactaatacgatggcttcaggcagtggcgcaccaatggcagacaataacgagggcgccgacggagtgggtaattcctcgggaaattggtattgcgattccacatggatgggcgacagagtcatcaccaccagcacccgcacctgggccctgcccacctacaacaaccatctgtacaagcaaatctccagccagtctggagccagcaacgacaaccactactttggctacagcaccccctgggggtattttgacttcaacagattccactgccacttctccccacgtgactggcaaagactcatcaacaacaactggggattccggcccaagagactcagcttcaagctctttaacattcaagtcaaagaggtcacgcagaatgacggtacgacgacgattgccaataaccttaccagcacggttcaggtgtttactgactcggagtaccagctcccgtacgtcctcggctcggcgcatcaaggatgcctcccgccgttcccagcagacgtcttcatggtgccacagtatggatacctcaccctgaacaacggcagtcaggcggtaggacgctcttccttttactgcctggagtactttccttctcagatgcttcgtaccggaaacaactttaccttcagctacacctttgaagacgttcctttccatagcagctacgctcacagccaaagtctggaccgtctcatgaatcctctcatcgaccagtacctgtattacttgagcagaacaaacactccaagcggaaccaccacgatgtccaggcttcagttttctcaggccggagcaagtgacattcgggaccagtctagaaactggcttcctggaccctgttaccgccagcagcgagtatcaaagacagctgcggacaacaacaacagtgattactcgtggactggagctaccaagtaccacctcaatggaagagactctctggtgaatccgggcccagctatggccagccacaaggacgatgaagaaaaatattttcctcagagcggggttctcatctttggaaaacaagactcgggaaaaactaatgtggacattgaaaaggttatgattacagacgaagaggaaatcaggaccaccaatcccgtggctacggagcagtatggttctgtatctaccaacctccagagcggcaacacacaagcagctacctcagatgtcaacacacaaggcgttcttccaggcatggtctggcaggacagagacgtgtacctgcaggggcccatctgggcaaagattccacacacggacggacattttcacccctctcccctcgtgggcggattcggacttaaacaccctcctccacaaattctcatcaagaacaccccggtacctgcgaatccttcgaccactttcagtgcggcaaagtttgcttccttcatcacacagtactccacggggcaggtcagcgtggagatcgagtgggagctgcagaaggagaacagcaaacgctggaatcccgaaattcagtacacttccaactacaacaaatctgttaatgtggactttactgtggacactaatggtgtgtattcagagcctcgccccattggcaccagatacctgactcgtaatctgtaa

SEQ ID NO: 218 - protein, 735 aa, synthetic construct
  REGION 1..735: note = source = /note="Description of Artificial Sequence: Synthetic polypeptide"
MAADGYLPDWLEDTLSEGIRQWWKLKPGPPPPKPAERHKDDSRGLVLPGYKYLGPFNGLDKGEPVNEADAAALEHDKAYDRQLDSGDNPYLKYNHADAEFQERLKEDTSFGGNLGRAVFQAKKRILEPLGLVEEPVKTAPGEKRPVEHSPAEPDSSSGTGKAGQQPARKRLNFGQTGDADSVPDPQPLGQPPAAPSGLGTNTMASGSGAPMADNNEGADGVGNSSGNWYCDSTWMGDRVITTSTRTWALPTYNNHLYKQISSQSGASNDNHYFGYSTPWGYFDFNRFHCHFSPRDWQRLINNNWGFRPKRLSFKLFNIQVKEVTQNDGTTTIANNLTSTVQVFTDSEYQLPYVLGSAHQGCLPPFPADVFMVPQYGYLTLNNGSQAVGRSSFYCLEYFPSQMLRTGNNFTFSYTFEDVPFHSSYAHSQSLDRLMNPLIDQYLYYLSRTNTPSGTTTMSRLQFSQAGASDIRDQSRNWLPGPCYRQQRVSKTAADNNNSDYSWTGATKYHLNGRDSLVNPGPAMASHKDDEEKYFPQSGVLIFGKQDSGKTNVDIEKVMITDEEEIRTTNPVATEQYGSVSTNLQSGNTQAATSDVNTQGVLPGMVWQDRDVYLQGPIWAKIPHTDGHFHPSPLVGGFGLKHPPPQILIKNTPVPANPSTTFSAAKFASFITQYSTGQVSVEIEWELQKENSKRWNPEIQYTSNYNKSVNVDFTVDTNGVYSEPRPIGTRYLTRNL

SEQ ID NO: 219 - DNA, 2209 bp, synthetic construct
  misc_feature 1..2209: note = source = /note="Description of Artificial Sequence: Synthetic polynucleotide"
  source 1..2209: mol_type = other DNA
atggctgccgatggttatcctccagattggctcgaggacactctctctgaagggataagacagtggtggaagctcaaacctggcccaccaccaccaaagcccgcagagcggcataaggacgacagcaggggtcttgtgcttcctgggtacaagtacctcggacccttcaacggactcgacaagggggagccggtcaacgaggcagacgccgcggccctcgagcacgacaaggcctacgaccggcagctcgacagcggagacaacccgtacctcaagtacaaccacgccgacgcagagtttcaggagcgccttaaagaagatacgtcttttgggggcaacctcggacgagcagtcttccaggcgaaaaagagggttcttgaacctctgggcctggttgaggaacctgttaagacggctccgggaaaaaagaggccggtagagcactctcctgtggagccagactcctcctcgggaaccggaaaagcgggccagcggcctgcaagaaaaagattaaattttggtcagactggagacgcagactccgtacctgacccccagcctctcggacagccaccagcagccccctctggtctgggatctactacaatggctacaggcagtggcgcaccaatggcagacaataacgagggtgccgatggagtgggtaattcctcaggaaattggcattgcgattcccaatggctgggcgacagagtcatcaccaccagcacccgaacctgggccctgcccacatacaacaaccacctctacaagcaaatctccagccaatcaggagccagcaacgacaaccactactttggctacagcaccccctgggggtattttgacttcaacagattccactgccacttttcaccacgtgactggcaaagactcatcaacaacaactggggattccggcccaaaagactcaacttcaagctctttaatattcaagtcaaagaggtcacgcagaatgacggtacgacgacgattgccaataaccttaccagcacggttcaggtgtttactgactcggagtaccagctcccgtacgtcctgggctcggcgcatcaaggatgcctcccgccgtttccagcggacgtcttcatggtcccacagtatggatacctcaccctgaacaacgggagtcaggcggtaggacgctcttccttttactgcctggagtactttccttctcagatgctgcgtactggaaacaactttcagttcagctacacttttgaagacgtgcctttccacagcagctacgctcacagccagagtctggatcggctgatgaatcctctgatcgaccagtacctgtattatctgaacaagacacaaacaaatagtggaactcttcagcagtctcggctactgtttagccaagctggaccaaccaacatgtctcttcaagctaaaaactggctgcctggaccttgctacagacagcagcgtctgtcaaaacaggcaaacgacaacaacaacagcaactttccctggactgcagctacaaagtatcatctaaatggccgggactcgttggttaatccaggaccagctatggccagtcacaaggatgacgaagaaaagtttttccccatgcatggaaccctgatatttggtaaacaaggaacaaatgccaacgacgcggatttggaaaatgtcatgattacagatgaagaagaaatcagggccaccaatcccgtggctacggagcagtacgggactgtgtcaaataatttgcaaaactcaaacactggtccaactactggaactgtcaatcgccaaggagcgttacctggtatggtgtggcaggatcgagacgtgtacctgcagggacccatttgggccaagattcctcacaccgatggacactttcatccttctccactgatgggaggttttggactcaaacacccgcctcctcagatcatgatcaaaaacactcccgttccagccaatcctcccacaaacttcagttctgccaagtttgcttctttcatcacacagtattccacgggacaggtcagcgtggagatcgagtgggagctgcagaaggagaacagcaaacgctggaatcccgaaattcagtacacttccaactacaacaagtctgttaatgtggactttactgtggacactaatggtgtgtattcagagcctcgccccattggcaccagatacctgactcgtaatctgtaat

SEQ ID NO: 220 - protein, 735 aa, synthetic construct
  REGION 1..735: note = source = /note="Description of Artificial Sequence: Synthetic polypeptide"
MAADGYPPDWLEDTLSEGIRQWWKLKPGPPPPKPAERHKDDSRGLVLPGYKYLGPFNGLDKGEPVNEADAAALEHDKAYDRQLDSGDNPYLKYNHADAEFQERLKEDTSFGGNLGRAVFQAKKRVLEPLGLVEEPVKTAPGKKRPVEHSPVEPDSSSGTGKAGQRPARKRLNFGQTGDADSVPDPQPLGQPPAAPSGLGSTTMATGSGAPMADNNEGADGVGNSSGNWHCDSQWLGDRVITTSTRTWALPTYNNHLYKQISSQSGASNDNHYFGYSTPWGYFDFNRFHCHFSPRDWQRLINNNWGFRPKRLNFKLFNIQVKEVTQNDGTTTIANNLTSTVQVFTDSEYQLPYVLGSAHQGCLPPFPADVFMVPQYGYLTLNNGSQAVGRSSFYCLEYFPSQMLRTGNNFQFSYTFEDVPFHSSYAHSQSLDRLMNPLIDQYLYYLNKTQTNSGTLQQSRLLFSQAGPTNMSLQAKNWLPGPCYRQQRLSKQANDNNNSNFPWTAATKYHLNGRDSLVNPGPAMASHKDDEEKFFPMHGTLIFGKQGTNANDADLENVMITDEEEIRATNPVATEQYGTVSNNLQNSNTGPTTGTVNRQGALPGMVWQDRDVYLQGPIWAKIPHTDGHFHPSPLMGGFGLKHPPPQIMIKNTPVPANPPTNFSSAKFASFITQYSTGQVSVEIEWELQKENSKRWNPEIQYTSNYNKSVNVDFTVDTNGVYSEPRPIGTRYLTRNL

SEQ ID NO: 221 - DNA, 2208 bp, synthetic construct
  misc_feature 1..2208: note = source = /note="Description of Artificial Sequence: Synthetic polynucleotide"
  source 1..2208: mol_type = other DNA
atggctgccgatggttatcttccagattggctcgaggacactctctctgaaggaataagacagtggtggaagctcaaacctggcccaccaccaccaaagcccgcagagcggcataaggacgacagcaggggtcttgtgcttcctgggtacaggtacctcggacccttcaacggactcgacaagggagagccggtcaacgaggcagacgccgcggccctcgagcacgacaaggcctacgaccggcagctcgacagcggagacaacccgtacctcaagtacaaccacgtcgacgcggagtttcaggagcgtcttaaagaagatacgtcttttgggggcaacctcggacgagcagtcttccaggccaaaaagaggattcttgaacctctgggcctggttgaggaacctgttaaggcggctccgggagaaaagaggccggtagagcactctcctgcggagccagactcctcctcgggaaccggaaaagcgggccagcagcctgcaagaaagagattgaattttggtcagactggagacgcagactcagtacctgacccccagcctctcggacagccaccagcagccccctctggtctgggaactaatacgatggcttcaggcagtggcgcaccaatggcagacaataacgagggcgccgacggagtgggtaattcctcgggaaattggcattgcgattccacatggatgggcgacagagtcatcaccaccagcacccgcacctgggccctgcccacctacaacaaccatctgtacaagcaaatctccagccagtctggagccagcaacgacaaccactactttggctacagcaccccctgggggcattttgacttcaacagattccactgccacttctccccacgtgactggcaaagactcatcaacaacaactggggattccggcccaagagactcagcttcaagctctttaacattcaagtcaaagaggtcacgcagaatgacggtacgacgacgattgccaataaccttaccagcacggttcaggtgtttactgactcggagtaccagctcccgtacgtcctcggctcggcgcatcaaggatgcctcccgccgttcccagcagacgtcttcatggtgccacagtatggatacctcaccctgaacaacggcagtcaggcggtaggacgctcttccttttactgcctggagtactttccttctcagatgcttcgtaccggaaacaactttaccttcagctacacctttgaagacgttcctttccatagcagctacgctcacagccaaagtctggaccgtctcatgaatcctctcatcgaccagtacctgtattacttgagcagaacaaacactccaagcggaaccaccacgatgtccaggcttcagttttctcaggccggagcaagtgacattcgggaccagtctagaaactggcttcctggaccctgttaccgccagcagcgagtatcaaagacagctgcggacaacaacaacagtgattactcgtggactggagctaccaagtaccacctcaatggaagagactctctggtgaatccgggcccagctatggccagccacaaggacgatgaagaaaaatattttcctcagagcggggttctcatctttggaaaacaagactcgggaaaaactaatgtggacattgaaaaggttatgattacagacgaagaggaaatcaggaccaccaatcccgtggctacggagcagtatggttctgtatctaccaacctccagagcggcaacacacaagcagctacctcagatgtcaacacacaaggcgttcttccaggcatggtctggcaggacagagacgtgtacctgcaggggcccatctgggcaaagattccacacacggacggacattttcacccctctccccccatgggcggattcggacttaaacaccctcctccacaaattctcatcaagaacaccccggtacctgcgaatccttcgaccactttcagtgcggcaaagtttgcttccttcatcacacagtactccacggggcaggtcagcgtggagatcgagtgggagctgcagaaggagaacagcaaacgctggaatcccgaaattcagtacacttccaactacaacaaatctgttaatgtggactttactgtggacactaatggtgtgtattcagagcctcgccccattggcgccagatacctgactcgtaatctgtaa

SEQ ID NO: 222 - protein, 735 aa, synthetic construct
  REGION 1..735: note = source = /note="Description of Artificial Sequence: Synthetic polypeptide"
MAADGYLPDWLEDTLSEGIRQWWKLKPGPPPPKPAERHKDDSRGLVLPGYRYLGPFNGLDKGEPVNEADAAALEHDKAYDRQLDSGDNPYLKYNHVDAEFQERLKEDTSFGGNLGRAVFQAKKRILEPLGLVEEPVKAAPGEKRPVEHSPAEPDSSSGTGKAGQQPARKRLNFGQTGDADSVPDPQPLGQPPAAPSGLGTNTMASGSGAPMADNNEGADGVGNSSGNWHCDSTWMGDRVITTSTRTWALPTYNNHLYKQISSQSGASNDNHYFGYSTPWGHFDFNRFHCHFSPRDWQRLINNNWGFRPKRLSFKLFNIQVKEVTQNDGTTTIANNLTSTVQVFTDSEYQLPYVLGSAHQGCLPPFPADVFMVPQYGYLTLNNGSQAVGRSSFYCLEYFPSQMLRTGNNFTFSYTFEDVPFHSSYAHSQSLDRLMNPLIDQYLYYLSRTNTPSGTTTMSRLQFSQAGASDIRDQSRNWLPGPCYRQQRVSKTAADNNNSDYSWTGATKYHLNGRDSLVNPGPAMASHKDDEEKYFPQSGVLIFGKQDSGKTNVDIEKVMITDEEEIRTTNPVATEQYGSVSTNLQSGNTQAATSDVNTQGVLPGMVWQDRDVYLQGPIWAKIPHTDGHFHPSPPMGGFGLKHPPPQILIKNTPVPANPSTTFSAAKFASFITQYSTGQVSVEIEWELQKENSKRWNPEIQYTSNYNKSVNVDFTVDTNGVYSEPRPIGARYLTRNL

SEQ ID NO: 223 - DNA, 2208 bp, synthetic construct
  misc_feature 1..2208: note = source = /note="Description of Artificial Sequence: Synthetic polynucleotide"
  source 1..2208: mol_type = other DNA
atggctgccgatggttatcttccagattggctcgaggacaccctctctgaaggaataagacagtggtggaagctcaaacctggcccaccaccaccaaagcccgcagagcggcataaggacgacagcaggggtcttgtgcttcctgggtacaagtacctcggacccttcaacggactcgacaagggagagccggtcaacgaggcagacgccgcggccctcgagcacgacaaggcctacgaccggcagctcgacagcggagataacccgtacctcaagtacaaccacgccgacgcggagtttcaggagcgccttaaagaggatacgtcttttgggggcaacctcggacgagcagtcttccaggccaaaaagaggattcttgaacctctgggcctggttgaggaacctgttaagacggctccgggaaaaaagaggccggtagagcactctcctgcggagccagactcctcctcgggaaccggaaaagcgggccagcagcctgcaagaaagagattgaattttggtcagactggagacgcagactcagtacctgacccccggcctctcggacagccaccagcagccccctctggtctgggaactaatacgatggcttcaggcagtggcgcaccaatggcagacaataacgagggcgccgacggagtgggtaattcctcgggaaattggcattgcgattccacatggatgggcgacagagtcatcaccaccagcacccgcacctgggccctgcccacctacaacaaccatctgtacaagcaaatctccagccagtctggagccagcaacgacaaccactactttggctacagcaccccctgggggtattttgacttcaacagattccactgccacttctccccacgtgactggcaaagactcatcaacaacaactggggattccggcccaagagactcagcttcaagctctttaacattcaagtcaaagaggtcacgcagaatgacggtacgacgacgattgccaataaccttaccagcacggttcaggtgtttactgactcggagtaccagctcccgtacgtcctcggctcggcgcatcaaggatgcctcccgccgttcccagcagacgtcttcatggtgccacagtatggatacctcaccctgaacaacggcagtcaggcggtaggacgctcttccttttactgcctggagtactttccttctcagatgcttcgtaccggaaacaactttaccttcagctacacctttgaagacgttcctttccatagcagctacgctcacagccaaagtctggaccgtctcatgaatcctctcatcgaccagtacctgtattacttgagcagaacaaacactccaagcggaaccaccacgatgtccaggcttcagttttctcaggccggagcaagtgacattcgggaccagtctagaaactggcttcctggaccctgttaccgccagcagcgagtatcaaagacagctgcggacaacaacaacagtgattactcgtggactggagctaccaagtaccacctcaatggaagagactctctggtgaatccgggcccagctatggccagccacaaggacgatgaagaaaaatattttcctcagagcggggttctcatctttggaaaacaagactcgggaaaaactaatgtggacattgaaaaggttatgattacagacgaagaggaaatcaggaccaccaatcccgtggctacggagcagtatggttctgtatctaccaacctccagagcggcaacacacaagcagctacctcagatgtcaacacacaaggcgttcttccaggcatggtctggcaggacagagacgtgtacctgcaggggcccatctgggcaaagattccacacacggacggacattttcacccctctcccctcatgggcggattcggacttaaacaccctcctccacaaattctcatcaagaacaccccggtacctgcgaatccttcgaccactttcagtgcggcaaagtttgcttccttcatcacacagtactccacggggcaggtcagcgtggagatcgagtgggagctgcagaaggagaacagcaaacgctggaatcccgaaattcagtacacttccaactacaacaaatctgttaatgtggactttactgtggacactaatggtgtgtattcagagcctcgccccattggcaccagatacctgactcgtaatctgtaa

SEQ ID NO: 224 - protein, 735 aa, synthetic construct
  REGION 1..735: note = source = /note="Description of Artificial Sequence: Synthetic polypeptide"
MAADGYLPDWLEDTLSEGIRQWWKLKPGPPPPKPAERHKDDSRGLVLPGYKYLGPFNGLDKGEPVNEADAAALEHDKAYDRQLDSGDNPYLKYNHADAEFQERLKEDTSFGGNLGRAVFQAKKRILEPLGLVEEPVKTAPGKKRPVEHSPAEPDSSSGTGKAGQQPARKRLNFGQTGDADSVPDPRPLGQPPAAPSGLGTNTMASGSGAPMADNNEGADGVGNSSGNWHCDSTWMGDRVITTSTRTWALPTYNNHLYKQISSQSGASNDNHYFGYSTPWGYFDFNRFHCHFSPRDWQRLINNNWGFRPKRLSFKLFNIQVKEVTQNDGTTTIANNLTSTVQVFTDSEYQLPYVLGSAHQGCLPPFPADVFMVPQYGYLTLNNGSQAVGRSSFYCLEYFPSQMLRTGNNFTFSYTFEDVPFHSSYAHSQSLDRLMNPLIDQYLYYLSRTNTPSGTTTMSRLQFSQAGASDIRDQSRNWLPGPCYRQQRVSKTAADNNNSDYSWTGATKYHLNGRDSLVNPGPAMASHKDDEEKYFPQSGVLIFGKQDSGKTNVDIEKVMITDEEEIRTTNPVATEQYGSVSTNLQSGNTQAATSDVNTQGVLPGMVWQDRDVYLQGPIWAKIPHTDGHFHPSPLMGGFGLKHPPPQILIKNTPVPANPSTTFSAAKFASFITQYSTGQVSVEIEWELQKENSKRWNPEIQYTSNYNKSVNVDFTVDTNGVYSEPRPIGTRYLTRNL

SEQ ID NO: 225 - DNA, 2208 bp, synthetic construct
  misc_feature 1..2208: note = source = /note="Description of Artificial Sequence: Synthetic polynucleotide"
  source 1..2208: mol_type = other DNA
atggctgccgatggttatcttccagattggctcgaggacactctctctgaaggaataagacagtggtggaagctcaaacctggcccaccaccaccaaagcccgcagagcggcataaggacgacagcaggggtcttgtgcttcctgggtacaagtacctcggacccttcaacggactcgacaagggagagccggtcaacgaggcagacgccgcggccctcgagcacgacaaggcctacgaccggcagctcgacagcggagacaacccgtacctcaagtacaaccacgccgacgcggagtttcaggagcgccttaaaggagatacgtcttttgggggcaacctcggacgagcagtcttccaggccaaaaagaggattcttgaacctctgggcctggttgaggaacctgttaagacggctccgggaaaaaagaggccggtagagcactctcctgcggagccagactcctcctcgggaaccggaaaagcgggccagcagcctgcaagaaagagattgaattttggtcagactggagacgcagactcagtacctgacccccagcctctcggacagccaccagcagccccctctggtctgggaactaatacgatggcttcaggcagtggcgcaccaatggcagacaataacgagggcgccgacggagtgggtaattcctcgggaaattggcattgcgattccacatggatgggcggcagagtcatcaccaccagcacccgcacctgggccctgcccacctacaacaaccatctgtacaagcaaatctccagccagtctggagccagcaacgacaaccactactttggctacagcaccccctgggggtattttgacttcaacagattccactgccacttctccccacgtgactggcaaagactcatcaacaacaactggggattccggcccaagagactcagcttcaagctctttaacattcaagtcaaagaggtcacgcagaatgacggtacgacgacgattgccaataaccttaccagcacggttcaggtgtttactgactcggagtaccagctcccgtacgtcctcggctcggcgcatcaaggatgcctcccgccgttcccagcagacgtcttcatggtgccacagtatggatacctcaccctgaacaacggcagtcaggcggtaggacgctcttccttttactgcctggagtactttccttctcagacgcttcgtaccggaaacaactttaccttcagctacacctttgaagacgttcctttccatagcagctacgctcacagccaaagtctggaccgtctcatgaatcctctcatcgaccagtacctgtattacttgagcagaacaaacactccaagcggaaccaccacgatgtccaggcttcagttttctcaggccggagcaagtgacattcgggaccagtctagaaactggcttcctggaccctgttaccgccagcagcgagtatcaaagacagctgcggacaacaacaacagtgattactcgtggactggagctaccaagtaccacctcaatggaagagactctctggtgaatccgggcccagctatggccagccacaaggacgatgaagaaaaatattttcctcagagcggggttctcatctttggaaaacaagactcgggaaaaactaatgtggacattgaaaaggttatgattacagacgaagaggaaatcaggaccaccaatcccgtggctacggagcagtatggttctgtatctaccaacctccagagcggcaacacacaagcagctacctcagatgtcaacacacaaggcgttcttccaggcatggtctggcaggacagagacgtgtacctgcaggggcccatctgggcaaagattccacacacggacggacattttcacccctctcccctcatgggcggattcggacttaaacaccctcctccacaaattctcatcaagaacaccccggtacctgcgaatccttcgaccactttcagtgcggcaaagtttgcttccttcatcacacagtactccacggggcaggtcagcgtggagatcgagtgggagctgcagaaggagaacagcaaacgctggaatcccgaaattcagtacacttccaactacaacaaatctgttaatgtggactttactgtggacactaatggtgtgtattcagagcctcgccccattggcaccagatacctgactcgtaatctgtaa

SEQ ID NO: 226 - protein, 735 aa, synthetic construct
  REGION 1..735: note = source = /note="Description of Artificial Sequence: Synthetic polypeptide"
MAADGYLPDWLEDTLSEGIRQWWKLKPGPPPPKPAERHKDDSRGLVLPGYKYLGPFNGLDKGEPVNEADAAALEHDKAYDRQLDSGDNPYLKYNHADAEFQERLKGDTSFGGNLGRAVFQAKKRILEPLGLVEEPVKTAPGKKRPVEHSPAEPDSSSGTGKAGQQPARKRLNFGQTGDADSVPDPQPLGQPPAAPSGLGTNTMASGSGAPMADNNEGADGVGNSSGNWHCDSTWMGGRVITTSTRTWALPTYNNHLYKQISSQSGASNDNHYFGYSTPWGYFDFNRFHCHFSPRDWQRLINNNWGFRPKRLSFKLFNIQVKEVTQNDGTTTIANNLTSTVQVFTDSEYQLPYVLGSAHQGCLPPFPADVFMVPQYGYLTLNNGSQAVGRSSFYCLEYFPSQTLRTGNNFTFSYTFEDVPFHSSYAHSQSLDRLMNPLIDQYLYYLSRTNTPSGTTTMSRLQFSQAGASDIRDQSRNWLPGPCYRQQRVSKTAADNNNSDYSWTGATKYHLNGRDSLVNPGPAMASHKDDEEKYFPQSGVLIFGKQDSGKTNVDIEKVMITDEEEIRTTNPVATEQYGSVSTNLQSGNTQAATSDVNTQGVLPGMVWQDRDVYLQGPIWAKIPHTDGHFHPSPLMGGFGLKHPPPQILIKNTPVPANPSTTFSAAKFASFITQYSTGQVSVEIEWELQKENSKRWNPEIQYTSNYNKSVNVDFTVDTNGVYSEPRPIGTRYLTRNL

SEQ ID NO: 227 - DNA, 2208 bp, synthetic construct
  misc_feature 1..2208: note = source = /note="Description of Artificial Sequence: Synthetic polynucleotide"
  source 1..2208: mol_type = other DNA
atggctgccgatggttatcttccagattggctcgaggacactctctctgaaggaataagacagtggtggaagctcaaacctggcccaccaccaccaaagcccgcagagcggcataaggacgacagcaggggtcttgtgcttcctgggtacaagtacctcggacccttcaacggactcgacaagggagagccggtcaacgaggcagacgccgcggccctcgagcacgacaaggcctacgaccggcagctcgacagcggagacaacccgtacctcaagtacaaccacgccgacgcggagtttcaggagcgtcttaaagaagatacgtcttttgggggcaacctcggacgagcagtcttccaggccaaaaagaggattcttgaacctctgggcctggttgaggaacctgttaagacggctccgggaaaaaagaggccggtagagcactctcctgcggagccagactcctcctcgggaaccggaaaagcgggccagcagcctgcaagaaagagattgaattttggtcagactggagacgcagactcagtacctgacccccagcctctcggacagccaccagcagccccctctggtctgggaactaatacgatggcttcaggcagtggcgcaccaatggcagacaataacgagggcgccgacggagtgggtaattcctcgggaaattggcattgcgattccacatggatgggcgacagagtcatcaccaccagcacccgcacctgggccctgcccacctgcaacaaccatctgtacaagcaaatctccagccagtctggagccagcaacgacaaccactactttggctacagcaccccctgggggtattttgacttcaacagattccactgccacttctccccacgtgactggcaaagactcatcaacaacaactggggattccggcccaagagactcagcttcaagctctttaacattcaagtcaaagaggtcacgcagaatgacggtacgacgacgattgccaataaccttaccagcacggttcaggtgtttactgactcggagtaccagctcccgtacgtcctcggctcggcgcatcaaggatgcctcccgccgttcccagcagacgtcttcatggtgccacagtatggatacctcaccctgaacaacggcagtcaggcggtaggacgctcttccttttactgcctggagtattttccttctcagatgcttcgtaccggaaacaactttaccttcagctacacctttgaagacgttcctttccatagcagctacgctcacagccaaagtctggaccgtctcatgaatcctctcatcgaccagtacctgtattacttgagcagaacaaacactccaagcggaaccaccacgatgtccaggcttcagttttctcaggccggagcaagtgacattcgggaccagtctagaaactggcttcctggaccctgttaccgccagcagcgagtatcaaagacagctgcggacaacaacaacagtgattactcgtggactggagctaccaagtaccacctcaatggaagagactctctggtgaatccgggcccagctatggccagccacaaggacgatgaagaaaaatattttcctcagagcggggttctcatctttggaaaacaagactcgggaaaaactaatgtggacattgaaaaggttatgattacagacgaagaggaaatcaggaccaccaatcccgtggctacggagcagtatggttctgtatctacctacctccagagcggcaacacacaagcagctacctcagatgtcaacacacaaggcgttcttccaggcatggtctggcaggacagagacgtgtacctgcgggggcccatctgggcaaagattccacacacggacggacattttcacccctctcccctcatgggcggatttggacttaaacaccctcctccacaaattctcatcaagaacaccccggtacctgcgaatccttcgaccactttcagtgcggcaaagtttgcttccttcatcacacagtactccacggggcaggtcagcgtggagatcgagtgggagctgcagaaggagaacagcaaacgctggaatcccgaaattcagtacacttccaactacaacaaatctgttaatgtggactttactgtggacactaatggtgtgtattcagagcctcgccccattggcaccagatacctgactcgtaatctgtaa

SEQ ID NO: 228 - protein, 735 aa, synthetic construct
  REGION 1..735: note = source = /note="Description of Artificial Sequence: Synthetic polypeptide"
MAADGYLPDWLEDTLSEGIRQWWKLKPGPPPPKPAERHKDDSRGLVLPGYKYLGPFNGLDKGEPVNEADAAALEHDKAYDRQLDSGDNPYLKYNHADAEFQERLKEDTSFGGNLGRAVFQAKKRILEPLGLVEEPVKTAPGKKRPVEHSPAEPDSSSGTGKAGQQPARKRLNFGQTGDADSVPDPQPLGQPPAAPSGLGTNTMASGSGAPMADNNEGADGVGNSSGNWHCDSTWMGDRVITTSTRTWALPTCNNHLYKQISSQSGASNDNHYFGYSTPWGYFDFNRFHCHFSPRDWQRLINNNWGFRPKRLSFKLFNIQVKEVTQNDGTTTIANNLTSTVQVFTDSEYQLPYVLGSAHQGCLPPFPADVFMVPQYGYLTLNNGSQAVGRSSFYCLEYFPSQMLRTGNNFTFSYTFEDVPFHSSYAHSQSLDRLMNPLIDQYLYYLSRTNTPSGTTTMSRLQFSQAGASDIRDQSRNWLPGPCYRQQRVSKTAADNNNSDYSWTGATKYHLNGRDSLVNPGPAMASHKDDEEKYFPQSGVLIFGKQDSGKTNVDIEKVMITDEEEIRTTNPVATEQYGSVSTYLQSGNTQAATSDVNTQGVLPGMVWQDRDVYLRGPIWAKIPHTDGHFHPSPLMGGFGLKHPPPQILIKNTPVPANPSTTFSAAKFASFITQYSTGQVSVEIEWELQKENSKRWNPEIQYTSNYNKSVNVDFTVDTNGVYSEPRPIGTRYLTRNL

SEQ ID NO: 229 - DNA, 2208 bp, synthetic construct; identical to SEQ ID NO: 223
  misc_feature 1..2208: note = source = /note="Description of Artificial Sequence: Synthetic polynucleotide"
  source 1..2208: mol_type = other DNA

SEQ ID NO: 230 - protein, 735 aa, synthetic construct; identical to SEQ ID NO: 224
  REGION 1..735: note = source = /note="Description of Artificial Sequence: Synthetic polypeptide"

SEQ ID NO: 231 - DNA, 2208 bp, synthetic construct
  misc_feature 1..2208: note = source = /note="Description of Artificial Sequence: Synthetic polynucleotide"
  source 1..2208: mol_type = other DNA
atggctgccgatggttatcttccagattggctcgaggacactctctctgaaggaataagacagtggtggaagctcaaacctggcccaccaccaccaaagcccgcagagcggcataaggacggcagcaggggtcttgtgcttcctgggtacaagtacctcggacccttcaacggactcgacaagggagagccggtcaacgaggcagacgccgcggccctcgagcacgacaaggcctacgaccggcagctcaacagcggagacaacccgtacctcaagtacaaccacgccgacgcggagtttcaggagcgccttaaagaagatacgtcttttgggggcaacctcggacgagcagtcttccaggcaaaaaagagggttcttgaacctctgggcctggttgaggagcctgttaaaacggctccgggaaaaaagagaccggtagagcactctcctgcggagccagactcctcctcgggaaccggaaaagcgggccagcagcctgcaagaaagagattgaattttggtcagactggagacgcagactccgtacctgacccccagcctctcggacagccaccagcagccccctctggtctgggatctactacaatggctacaggcagtggcgcaccaatggcagacaataacgagggtgccgatggagtgggtaattcctcaggaaattggcattgcgattcccaatggctgggcgacagagtcatcaccacaagcactcgaacctgggccctgcccacctacaacaaccacctctacaagcaaatctccagccaatcaggagcctcaaacgacaaccactattttggctacagcaccccttgggggtattttgacttcaacagattccactgccacttttcaccacgtgactggcaaagactcatcaacaacaactggggattccgacccaagagactcaacttcaagctctttaacattcaagtcaaagaggtcacgcagaatgacggtacgacgacgattgccaataaccttaccagcacggttcaggtgtttactgactcggagtaccagctcccgtacgtcctcggctcggcgcatcaaggatgcctcccgccgttcccagcggacgtcttcatggtcccacagtatggatacctcaccctgaacaacgggagtcaggcggtaggacgctctcccttttactgcctggagtactttccttctcagatgctgcgtactggaaacaactttcagttcagctacacttttgaagacgtgcctttccacagcagctacgctcacagccagagtctggatcggctgatgaatcctctgatcgaccagtacctgtattatctgaacaagacacaaacaaatagtggaactcttcagcagtctcggctactgtttagccaagctggacccaccaacatgtctcttcaagctaaaaactggctgcctggaccttgctacagacagcagcgtctgtcaaagcaggcaaacgacaacaacaacagcaactttccctggactgcagctacaaagtatcatctaaatggccgggactcgttggttaatccaggaccagctatggccagtcacaaggatgacgaagaaaagtttttccccatgcatggaaccctgatatttggtaaacaaggaacaaatgccaacgacgcggatttggaaaatgtcatgattacagatgaagaagaaatcaggaccaccaatcccgtggctacggagcagtacgggactgtgtcaaataatttgcaaaactcaaacactggtccaactactggaactgtcaatcaccaaggagcgttacctggtatggtgtggcaggatcgagatgtgtaccttcagggacccatttgggccaagattcctcacaccgatggacactttcatccttctccactgatgggaggttttggactcaaacacccgcctcctcagattatgatcaaaaacactcccgttccagccaatcctcctacaaacttcagttctgccaagtttgcttctttcatcacacagtattccacggggcaggtcagcgtggagatcgagtgggagctgcagaaggagaacagcaaacgctggaatcccgaaattcagtacacttccaactacaacaaatctgttaatgtggactttactgtggacaataatggcgtgtactcagagcctcgccccattggcaccagatacctgactcgtaatctgtaa

SEQ ID NO: 232 - protein, 735 aa, synthetic construct
  REGION 1..735: note = source = /note="Description of Artificial Sequence: Synthetic polypeptide"
MAADGYLPDWLEDTLSEGIRQWWKLKPGPPPPKPAERHKDGSRGLVLPGYKYLGPFNGLDKGEPVNEADAAALEHDKAYDRQLNSGDNPYLKYNHADAEFQERLKEDTSFGGNLGRAVFQAKKRVLEPLGLVEEPVKTAPGKKRPVEHSPAEPDSSSGTGKAGQQPARKRLNFGQTGDADSVPDPQPLGQPPAAPSGLGSTTMATGSGAPMADNNEGADGVGNSSGNWHCDSQWLGDRVITTSTRTWALPTYNNHLYKQISSQSGASNDNHYFGYSTPWGYFDFNRFHCHFSPRDWQRLINNNWGFRPKRLNFKLFNIQVKEVTQNDGTTTIANNLTSTVQVFTDSEYQLPYVLGSAHQGCLPPFPADVFMVPQYGYLTLNNGSQAVGRSPFYCLEYFPSQMLRTGNNFQFSYTFEDVPFHSSYAHSQSLDRLMNPLIDQYLYYLNKTQTNSGTLQQSRLLFSQAGPTNMSLQAKNWLPGPCYRQQRLSKQANDNNNSNFPWTAATKYHLNGRDSLVNPGPAMASHKDDEEKFFPMHGTLIFGKQGTNANDADLENVMITDEEEIRTTNPVATEQYGTVSNNLQNSNTGPTTGTVNHQGALPGMVWQDRDVYLQGPIWAKIPHTDGHFHPSPLMGGFGLKHPPPQIMIKNTPVPANPPTNFSSAKFASFITQYSTGQVSVEIEWELQKENSKRWNPEIQYTSNYNKSVNVDFTVDNNGVYSEPRPIGTRYLTRNL

SEQ ID NO: 233 - DNA, 2208 bp, synthetic construct
  misc_feature 1..2208: note = source = /note="Description of Artificial Sequence: Synthetic polynucleotide"
  source 1..2208: mol_type = other DNA
atggctgccgatggttatcttccagattggctcgaggacactctctctgaaggaataagacagtggtggaagctcaaacctggcccaccaccaccaaagcccgcagagcggcataaggacgacagcaggggtcttgtgcttcctgggtacaagtacctcggacccttcaacggactcgacaagggagagccggtcaacgaggcagacgccgcggccctcgagcacgacaaggcctacgaccggcagctcgacagcggagacaacccgtacctcaagtacaaccacgccgacgcggagtttcaggagcgtcttaaagaagatacgtcttttgggggcaacctcggacgagcagtcttccaggccaaaaagaggattcttgaacctctgggcctggttgaggaacctgttaagacggctccgggaaaaaagaggccggtagagcactctcctgcggagccagactcctcctcgggaaccggaaaagcgggccagcagcctgcaagaaagagattgaattttggtcagactggagacgcagactcagtacctgacccccagcctctcggacagccaccagcagccccctctggtctgggaactaatacgatggcttcaggcagtggcgcaccaatggcagacaataacgagggcgccgacggagtgggtaattcctcgggaaattggcattgcgattccacatggatgggcgacagagtcatcaccaccagcacccgcacctgggccctgcccacctacaacaaccatctgtacaagcaaatctccagccagtctggagccagcaacgacaaccactactttggctacagcaccccctgggggtattttgacttcaacagattccactgccacttctccccacgtgactggcaaagactcatcaacaacaactggggattccggcccaagagactcagcttcaagctctttaacattcaagtcaaagaggtcacgcagaatgacggtacgacgacgattgccaataaccttaccagcacggttcaggtgtttactgactcggagtaccagctcccgtacgtcctcggctcggcgcatcaaggatgcctcccgccgttcccagcagacgtcttcatggtgccacagtatggatacctcaccctgaacaacggcagtcaggcggtaggacgctcttccttttactgcctggagtactttccttctcagatgcttcgtaccggaaacaactttaccttcagctacacctttgaagacgttcctttccatagcagctacgctcacagccaaagtctggaccgtctcatgaatcctctcatcgaccagtacctgtattacttgagcagaacaaacactccaagcggaaccaccacgatgtccaggcttcagttttctcaggccggagcaagtgacattcgggaccagtctagaaactggcttcctggaccctgttaccgccagcagcgagtatcaaagacagctgcggacaacaacaacagtgattactcgtggactggagctaccaagtaccacctcaatggaagagactctctggtgaatccgggcccagctatggccagccacaaggacgatgaagaaaaatattttcctcagagcggggttctcatctttggaaaacaagactcgggaaaaactaatgtggacattgaaaaggttatgattacagacgaagaggaaatcaggaccaccaatcccgtggctacggagcagtatggttctgtatctaccaacctccagagcggcaacacacaagcagctacctcagatgtcaacacacaaggcgttcttccaggcatggtctggcaggacagagacgtgtacctgcaggggcccatctgggcaaagattccacacacggacggacattttcacccctctcccctcatgggcggattcggacttaaacaccctcctccacaaattctcatcaagaacaccccggtacctgcgaatccttcgaccactttcagtgcggcaaagtttgcttccttcatcacacagtactccacggggcaggtcagcgtggagatcgagtgggagctgcagaaggagaacagcaaacgctggaatcccgaaattcagtacacttccaactacaacaaatctgttaatgtggactttactgtggacactaatggtgtgtattcagagcctcgccccattggcaccagatacctgactcgtaatctgtaa

SEQ ID NO: 234 - protein, 735 aa, synthetic construct
  REGION 1..735: note = source = /note="Description of Artificial Sequence: Synthetic polypeptide"
MAADGYLPDWLEDTLSEGIRQWWKLKPGPPPPKPAERHKDDSRGLVLPGYKYLGPFNGLDKGEPVNEADAAALEHDKAYDRQLDSGDNPYLKYNHADAEFQERLKEDTSFGGNLGRAVFQAKKRILEPLGLVEEPVKTAPGKKRPVEHSPAEPDSSSGTGKAGQQPARKRLNFGQTGDADSVPDPQPLGQPPAAPSGLGTNTMASGSGAPMADNNEGADGVGNSSGNWHCDSTWMGDRVITTSTRTWALPTYNNHLYKQISSQSGASNDNHYFGYSTPWGYFDFNRFHCHFSPRDWQRLINNNWGFRPKRLSFKLFNIQVKEVTQNDGTTTIANNLTSTVQVFTDSEYQLPYVLGSAHQGCLPPFPADVFMVPQYGYLTLNNGSQAVGRSSFYCLEYFPSQMLRTGNNFTFSYTFEDVPFHSSYAHSQSLDRLMNPLIDQYLYYLSRTNTPSGTTTMSRLQFSQAGASDIRDQSRNWLPGPCYRQQRVSKTAADNNNSDYSWTGATKYHLNGRDSLVNPGPAMASHKDDEEKYFPQSGVLIFGKQDSGKTNVDIEKVMITDEEEIRTTNPVATEQYGSVSTNLQSGNTQAATSDVNTQGVLPGMVWQDRDVYLQGPIWAKIPHTDGHFHPSPLMGGFGLKHPPPQILIKNTPVPANPSTTFSAAKFASFITQYSTGQVSVEIEWELQKENSKRWNPEIQYTSNYNKSVNVDFTVDTNGVYSEPRPIGTRYLTRNL

SEQ ID NO: 235 - DNA, 2208 bp, synthetic construct
  misc_feature 1..2208: note = source = /note="Description of Artificial Sequence: Synthetic polynucleotide"
  source 1..2208: mol_type = other DNA
atggctgccgatggttatcttccagattggctcgaggacactctctctgaaggaataagacagtggtggaagctcaaacctggcccaccaccaccaaagcccgcagagcggcataaggacgacagcaggggtcttgtgcttcctgggtacaagtacctcggacccttcaacggactcgacaagggagagccggtcaacgaggcagacgccgcggccctcgagcacgacaaggcctacgaccggcagctcgacagcggagacaacccgtacctcaagtacaaccacgccgacgcggagtttcaggagcgtcttaaagaagatacgtcttttgggggcaacctcggacgagcagtcttccaggccaaaaagaggattcttgaacctctgggcctggttgaggaacctgttaagacggctccgggaaaaaagaggccggtagagcactctcctgcggagccagactcctcctcgggaaccggaaaagcgggccagcagcctgcaagaaagagattgaattttggtcagactggagacgcagactcagtacctgacccccagcctctcggacagccaccagcagccccctctggtctgggaactaatacgatggcttcaggcagtggcgcaccaatggcagacaataacgagggcgccgacggagtgggtaattcctcgggaaattggcattgcgattccacatggatgggcgacagagtcatcaccaccagcacccgcacctgggccctgcccacctacaacaaccatctgtacaagcaaatctccagccagtctggagccagcaacgacaaccactactttggctacagcaccccctgggggtatttcgacttcaacagattccactgccacttctccccacgtgactggcaaagactcatcaacaacaactggggattccggcccaagagactcagcttcaagctctttaacattcaagtcaaagaggtcacgcagaatgacggtacgacgacgattgccaataaccttaccagcacggttcaggtgtttactgactcggggtaccagctcccgtacgtcctcggctcggcgcatcaaggatgccttccgccgttcccagcagacgtcttcatggtgccacagtatggatacctcaccctgaacaacggcagtcaggcggtaggacgctcttccttttactgcctggagtactttccttctcagatgcttcgtaccggaaacaactttaccttcagctacacctttgaagacgttcctttccatagcagctacgctcacggccaaagtctggaccgtctcatgaatcctctcatcgaccagtacctgtattacttgagcagaacaaacactccaagcggaaccaccacgatgtccaggcttcagttttctcaggccggagcaagtgacgttcgggaccagtctagaaactggcttcctggaccctgttaccgccagcagcgagtatcaaagacagctgcggacaacaacaacagtgattactcgtggactggagctaccaagtaccacctcaatggaagagactctctggtgaatccgggcccagctatggccagccacaaggacgatgaagaaaaatattttcctcagagcggggttctcgtctttggaaaacaagactcgggaaaaactaatgtggacattgaaaaggttatgattacagacgaagaggaaatcaggaccaccaatcccgcggctacggagcagtatggttctgtatctaccaacctccagagcggcaacacacaagcagctacctcagatgtcaacacacaaggcgttcttccaggcatggtctggcaggacagagacgtgtacctgcaggggcccatctgggcaaagattccacacacggacggacattttcacccctctcccctcatgggcggattcggacttaaacaccctcctccacaaattctcatcaagaacaccccggtacctgcgaatccttcgaccactttcagtgcggcaaagtttgtttccttcatcacacagtactccacggggcaggtcagcgtggagatcgagtgggagctgcagaaggagaacagcaaacgctggaatcccgaaattcagtacacttccaactacaacaaatctgttaatgtggactttactgtggacactaatggtgtgtattcagagcctcgccccattggcaccagatacctgactcgtaatctgtaa

SEQ ID NO: 236 - protein, 735 aa, synthetic construct
  REGION 1..735: note = source = /note="Description of Artificial Sequence: Synthetic polypeptide"
MAADGYLPDWLEDTLSEGIRQWWKLKPGPPPPKPAERHKDDSRGLVLPGYKYLGPFNGLDKGEPVNEADAAALEHDKAYDRQLDSGDNPYLKYNHADAEFQERLKEDTSFGGNLGRAVFQAKKRILEPLGLVEEPVKTAPGKKRPVEHSPAEPDSSSGTGKAGQQPARKRLNFGQTGDADSVPDPQPLGQPPAAPSGLGTNTMASGSGAPMADNNEGADGVGNSSGNWHCDSTWMGDRVITTSTRTWALPTYNNHLYKQISSQSGASNDNHYFGYSTPWGYFDFNRFHCHFSPRDWQRLINNNWGFRPKRLSFKLFNIQVKEVTQNDGTTTIANNLTSTVQVFTDSGYQLPYVLGSAHQGCLPPFPADVFMVPQYGYLTLNNGSQAVGRSSFYCLEYFPSQMLRTGNNFTFSYTFEDVPFHSSYAHGQSLDRLMNPLIDQYLYYLSRTNTPSGTTTMSRLQFSQAGASDVRDQSRNWLPGPCYRQQRVSKTAADNNNSDYSWTGATKYHLNGRDSLVNPGPAMASHKDDEEKYFPQSGVLVFGKQDSGKTNVDIEKVMITDEEEIRTTNPAATEQYGSVSTNLQSGNTQAATSDVNTQGVLPGMVWQDRDVYLQGPIWAKIPHTDGHFHPSPLMGGFGLKHPPPQILIKNTPVPANPSTTFSAAKFVSFITQYSTGQVSVEIEWELQKENSKRWNPEIQYTSNYNKSVNVDFTVDTNGVYSEPRPIGTRYLTRNL

SEQ ID NO: 237 - DNA, 2208 bp, synthetic construct
  misc_feature 1..2208: note = source = /note="Description of Artificial Sequence: Synthetic polynucleotide"
  source 1..2208: mol_type = other DNA
atggctgccgatggttatcttccagattggctcgaggacactctctctgaaggaataagacagtggtggaaactcaaacctggcccaccaccaccaaagcccgcagagcggcataaggacgacagcaggggtcttgtgcttcctgggtacaagtacctcggacccttcaacggactcgacaagggagagccggtcaacgaggcagacgccgcggccctcgagcacgacaaggcctacgaccggcagctcgacagcggagacaacccgtacctcaagtacaaccacgccgacgcggagtttcaggagcgccttaaagaagatacgtcttttgggggcaacctcggacgagcagtcttccaggcaaaaaagagggttctggaacctctgagcctggttgaggagcctgttaagacggctccgggaaaaaagaggccggtagagcactctcccgcagagccagattcctcctccggaactggaaagtcgggcaaccagcctgcaagaaagagattgaatttcggtcagactggagactcagactccgtacctgacccccagcctctcggacagccaccagcagccccctctggtctgggaactaatacgatggctacaggcagtggcgcaccaatggcagacaataacgagggcgccgacggagtgggtaattcctcgggaaattggcattgcgattccacatggatgggcgacagagtcatcaccaccagcacccgaacctgggccctgcccacctacaacaaccatctgtacaagcaaatatccagccagtctggagccagcaacgacaatcactactttggctacagcaccccctgggggtattttgacttcaacagattccactgccacttttcaccacgtgactggcaaagactcatcaacaacaactggggattccgacccaagagactcaacttcaagctctttaacattcaagtcaaagaggtcacgcagaatgacggtacgacgacgattgccaataaccttaccagcacggttcaggtgtttactgactcggagtaccagctcccgtacgtcctcggctcggcgcatcaaggatgcctcccgccgttcccagcagacgtcttcatggtgccacagtatggatacctcaccctgaacaacgggagtcaggcagtaggacgctcttcattttactgcctagagtactttccttctcagatgctgcgtaccggaaacaactttaccttcagctacacctttgaggacgttcctttccacagcagctacgctcacagccagagtttggaccgtctcatgaatcctctcatcgaccagtacctgtattacttgagcagaacaaacactccaagcggaaccaccacgcagtccaggcttcagttttctcaggccggagcgagtgacattcaggaccagtctaggaactggcttcctggaccctgttaccgtcagcagcgagtatcaaagacatctgcggataacaacaacagtgaatactcgtggactggagctaccaagtaccacctcaatggcagagactctctggtgaatccgggcccggccatggccagccacaaagacgatgaagaaaagttttttcctcagagcggggttcttatctttgggaagcaaggctcagagaaaacaaatgtggatattgaaaaggtcatgattacagacgaagaggaaatcaggaccaccaatcccgtggctacggagcagtatggttctgtatctaccaacctccagagcggcaacacacaagcagctaccgcagatgtcaacacacaaggcgttcttccaggcatggtcgggcaagacagagacgtgtacctgcaggggcctacttgggcaaagattccacacacggacggacattttcacccctctcccctcatgggcggatttggacttaaacaccctcctccacagattctcatcaagaacaccccggtacctgcgaatccttcgaccaccttcagtgcggcaaagtttgcttccttcattacacagtactccacggggcaggtcagcgtggagatcgagtgggagctgcagaaggagaacagcaaacgctggaatcccgagatccagtacacttccaactacaacaagtctgttaatgtggactttactgtggacactaatggcgtgtattcagagcctcgccccattggcaccagatacctgactcgtaatctgtaa

SEQ ID NO: 238 - protein, 735 aa, synthetic construct
  REGION 1..735: note = source = /note="Description of Artificial Sequence: Synthetic polypeptide"
MAADGYLPDWLEDTLSEGIRQWWKLKPGPPPPKPAERHKDDSRGLVLPGYKYLGPFNGLDKGEPVNEADAAALEHDKAYDRQLDSGDNPYLKYNHADAEFQERLKEDTSFGGNLGRAVFQAKKRVLEPLSLVEEPVKTAPGKKRPVEHSPAEPDSSSGTGKSGNQPARKRLNFGQTGDSDSVPDPQPLGQPPAAPSGLGTNTMATGSGAPMADNNEGADGVGNSSGNWHCDSTWMGDRVITTSTRTWALPTYNNHLYKQISSQSGASNDNHYFGYSTPWGYFDFNRFHCHFSPRDWQRLINNNWGFRPKRLNFKLFNIQVKEVTQNDGTTTIANNLTSTVQVFTDSEYQLPYVLGSAHQGCLPPFPADVFMVPQYGYLTLNNGSQAVGRSSFYCLEYFPSQMLRTGNNFTFSYTFEDVPFHSSYAHSQSLDRLMNPLIDQYLYYLSRTNTPSGTTTQSRLQFSQAGASDIQDQSRNWLPGPCYRQQRVSKTSADNNNSEYSWTGATKYHLNGRDSLVNPGPAMASHKDDEEKFFPQSGVLIFGKQGSEKTNVDIEKVMITDEEEIRTTNPVATEQYGSVSTNLQSGNTQAATADVNTQGVLPGMVGQDRDVYLQGPTWAKIPHTDGHFHPSPLMGGFGLKHPPPQILIKNTPVPANPSTTFSAAKFASFITQYSTGQVSVEIEWELQKENSKRWNPEIQYTSNYNKSVNVDFTVDTNGVYSEPRPIGTRYLTRNL

SEQ ID NO: 239 - DNA, 2208 bp, synthetic construct
  misc_feature 1..2208: note = source = /note="Description of Artificial Sequence: Synthetic polynucleotide"
  source 1..2208: mol_type = other DNA
atggctgccgatggttatcttccagattggctcgaggacactctctctgaaggaataagacagtggtggaagctcaaacctggcccaccaccaccaaagcccgcagagcggcataaggacgacagcaggggtcttgtgcttcctgggtacaagtacctcggacccttcaacggactcgacaagggagagccggtcaacgaggcagacgccgcggccctcgagcacgacaaggcctacgaccggcagctcgacagcggagacaacccgtacctcaagtacaaccacgccgacgcagagtttcaggagcgccttaaagaagatacgtcttttgggggcaacctcggacgagcagtcttccaggcaaaaaagagggttctggaacctctgggcctggttgaggagcctgttaagacggctccgggaaaaaagaggccggtagagcactctcctgcagagccagattcctcctccggaactggaaagtcgggcaaccagcctgcaagaaagagattgaatttcggtcagactggagactcagactccgtacctgacccccagcctctcggacagccaccagcagccccctctggtctgggaactaatacgatggctacaggcagtggcgcaccaatggcagacaataacgagggcgccgacggagtgggtaattcctcgggaaattggcattgcgattccacatggatgggcgacagagtcatcaccaccagcacccgaacctgggccctgcccacctacaacaaccatctgtacaagcaaatatccagccagtctggagccagcaacgacaatcactactttggctacagcaccccctgggggtattttgacttcaacagattccactgccacttttcaccacgtgactggcaaagactcatcaacaacaactggggattccgacccaagagactcaacttcaagctctttaacattcaagtcaaagaggtcacgcagaatgacggtacgacgacgattgccaataaccttaccagcacggttcaggtgtttactgactcggagtaccagctcccgtacgtcctcggctcggcgcatcaaggatgcctcccgccgttcccagcagacgtcttcatggtgccacagtatggatacctcaccctgaacaacgggagtcaggcagtaggacgctcttcattttactgcctagggtactttccttctcagatgctgcgtaccggaaacaactttaccttcagctacacctttgaggacgttcctttccacagcagctacgctcacagccagagtttggaccgtctcatgaatcctctcatcgaccagtacctgtattacttgagcagaacaaacactccaagcggaaccaccacgcagtccaggcttcagttttctcaggccggagcgagtgacattcgggaccagtctaggaactggcttcctggaccctgttaccgtcagcagcgagtatcaaagacatctgcggataacaacaacagtgaatactcgtggactggagctaccaagtaccacctcaatggcagagactctctggtgaatccgggcccggccatggccagccacaaagacgatgaagaaaagttttttcctcagagcggggttcttatctttgggaagcaaggcccagagaaaacaaatgtggatattgaaaaggtcatgattacagacgaagaggaaatcaggaccaccaatcccgtggctacggagcagtatggttctgtatctaccaacctccagagcggcaacacacaagcagctaccgcagatgtcaacacacaaggcgttcttccaggcatggtctggcaagacagagacgtgtacctgcaggggcctatttgggcaaagattccacacacggacggacattttcacccctctcccctcatgggcggatttggacttaaacaccctcctccacagattctcatcaagaacaccccggtacctgcgaatccttcgaccaccttcagtgcggcaaagtttgcttccttcattacacagtactccacggggcaggtcagcgtggagatcgagtgggagctgcagaaggagaacagcaaacgctggaatcccgagatccagtacacttccaactacaacaagtctgttaatgtggactttactgtggacactaatggcgtgtattcagagcctcgccccattggcaccagatacctgactcgtaatctgtaa

SEQ ID NO: 240 - protein, 735 aa, synthetic construct
  REGION 1..735: note = source = /note="Description of Artificial Sequence: Synthetic polypeptide"
MAADGYLPDWLEDTLSEGIRQWWKLKPGPPPPKPAERHKDDSRGLVLPGYKYLGPFNGLDKGEPVNEADAAALEHDKAYDRQLDSGDNPYLKYNHADAEFQERLKEDTSFGGNLGRAVFQAKKRVLEPLGLVEEPVKTAPGKKRPVEHSPAEPDSSSGTGKSGNQPARKRLNFGQTGDSDSVPDPQPLGQPPAAPSGLGTNTMATGSGAPMADNNEGADGVGNSSGNWHCDSTWMGDRVITTSTRTWALPTYNNHLYKQISSQSGASNDNHYFGYSTPWGYFDFNRFHCHFSPRDWQRLINNNWGFRPKRLNFKLFNIQVKEVTQNDGTTTIANNLTSTVQVFTDSEYQLPYVLGSAHQGCLPPFPADVFMVPQYGYLTLNNGSQAVGRSSFYCLGYFPSQMLRTGNNFTFSYTFEDVPFHSSYAHSQSLDRLMNPLIDQYLYYLSRTNTPSGTTTQSRLQFSQAGASDIRDQSRNWLPGPCYRQQRVSKTSADNNNSEYSWTGATKYHLNGRDSLVNPGPAMASHKDDEEKFFPQSGVLIFGKQGPEKTNVDIEKVMITDEEEIRTTNPVATEQYGSVSTNLQSGNTQAATADVNTQGVLPGMVWQDRDVYLQGPIWAKIPHTDGHFHPSPLMGGFGLKHPPPQILIKNTPVPANPSTTFSAAKFASFITQYSTGQVSVEIEWELQKENSKRWNPEIQYTSNYNKSVNVDFTVDTNGVYSEPRPIGTRYLTRNL

SEQ ID NO: 241 - protein, 735 aa, synthetic construct
  REGION 1..735: note = source = /note="Description of Artificial Sequence: Synthetic polypeptide"
MAADGYLPDWLEDTLSEGIRQWWKLKPGPPPPKPAERHKDDSRGLVLPGYKYLGPFNGLDKGEPVNEADAAALEHDKAYDRQLDSGDNPYLKYNHADAEFQERLKEDTSFGGNLGRAVFQAKKRVLEPLGLVEEPVKTAPGKKRPVEHSPAEPDSSSGTGKSGNQPARKRLNFGQTGDSDSVPDPQPLGQPPAAPSGLGTNTMATGSGAPMADNNEGADGVGNSSGNWHCDSTWMGDRVITTSTRTWALPTYNNHLYKQISSQSGASNDNHYFGYSTPWGYFDFNRFHCHFSPRDWQRLINNNWGFRPKRLNFKLFNIQVKEVTQNDGTTTIANNLTSTVQVFTDSEYQLPYVLGSAHQGCLPPFPADVFMVPQYGYLTLNNGSQAVGRSSFYCLEYFPSQMLRTGNNFTFSYTFEDVPFHSSYAHSQSLDRLMNPLIDQYLYYLSRTNTPSGTTTQSRLQFSQAGASDIRDQSRNWLPGPCYRQQRVSKTSADNNNSEYSWTGATKYHLNGRDSLVNPGPAMASHKDDEEKFFPQSGVLIFGKQGPEKTNVDIEKVMITDEEEIRTTNPVATEQYGSVSTNLQSGNTQAATADVNTQGVLPGMVWQDRDVYLQGPIWAKIPHTDGHFHPSPLMGGFGLKHPPPQILIKNTPVPANPSTTFSAAKFASFITQYSTGQVSVEIEWELQKENSKRWNPEIQYTSNYNKSVNVDFTVDTNGVYSEPRPIGTRYLTRNL

SEQ ID NO: 242 - protein, 735 aa, synthetic construct; identical to SEQ ID NO: 241
  REGION 1..735: note = source = /note="Description of Artificial Sequence: Synthetic polypeptide"

SEQ ID NO: 243 - DNA, 2211 bp, synthetic construct
  misc_feature 1..2211: note = source = /note="Description of Artificial Sequence: Synthetic polynucleotide"
  source 1..2211: mol_type = other DNA
atggctgccgatggttatcttccagattggctcgaggacactctctctgaaggaataagacagtggtggaagctcaaacctggcccaccaccaccaaagcccgcagagcggcataaggacgacagcaggggtcttgtgcttcctgggtacaagtacctcggacccttcaacggactcgacaagggggagccggtcaacgaggcagacgccgcggccctcgagcacgacaaggcctacgaccggcagctcgacagcggagacaacccgtacctcaagtacaaccacgccgacgcagagtttcaggagcgccttaaagaagatacgtcttttgggggcaacctcggacgagcagtcttccaggcgaaaaagagggttcttgaacctctgcggcctggtttgaggaaacctgttaagacggctccgggaaaaaagaggccggtagagcactctcctgtggagccagactcctcctcgggaaccggaaaagcgggccagcagcctgcaagaaaaagattaaattttggtcagactggagacgcagactccgtacctgacccccagcctctcggacagccaccagcagccccctctggtctgggatctactacaatggctacaggcagtggcgcaccaatggcagacaataacgagggtgccgatggagtgggtaattcctcaggaaattggcattgcgattcccaatggctggacgacagagtcatcgccaccagcacccgaacctgggccctgcccacatacaacaaccacctctacaagcaaatctccagccaatcaggagcctgcaacgacaaccactactttggctacagcaccccctgggggtattttgacttcaacagattccactgccacttttcaccacgtgactggcaaagactcatcaacagcaactggggattccggcccaaaagactcaacttcaagctctttaatattcaagtcaaagaggtcacgcagaatgacggtacgacgacgattgccaataaccttaccagcacggttcaggtgtttactgactcggagtaccagctcccgtacgtcccgggctcggcgcatcaaggatgcctcccgccgtttccagcggacgtcttcatggtcccacagtatggatacctcaccctgaacaacgggagtcaggcggtaggacgctcttccttttactgcctggagtactttccttctcagatgctgcgtactggaaacaactttcagttcagctacacttttgaagacgtgcctttccacagcagctacgctcactgccagagtctggatcggctgatgaatcctctgatcgaccagtacctgtattatctgaacaagacacaaacaaatagtggaactcttcagcagtctcggctactgtttagccaagctggaccaaccaacatgtctcttcaagctaaaaactggctgcctggaccttgctacagacagcagcgtctgtcaaaacaggcaaacgacaataacaactgcaactttccctggactgcagctacaaagtatcatctaaatggccgggactcgttggttaatccaggaccagctatggccagtcacaaggatgacgaagaaaagtttttccccatgcatggaaccctgatatttggtaaacaaggaacaaatgccaacgacgcggatttggaaaatgtcatgattacagatgaagaagaaatcaggcccaccaatcccgtggctacggagcagtacgggactgtgtcaaataatttgcaaaactcaaacactggtccaactacaggaactgtcaatcaccaaggagcgttacctggtatggtgtggcaggatcgagacgtgtacctgcagggacccatttgggccaagattcctcacaccgatggacactttcatccttctccactgatgggaggttttggactcaaacacccgcctcctcagatcatgatcaaaagcactcccgttccagccaatcctcccacaaacttcagttctgccaagtttgcttcttccatcacacagtattccacgggacaggtcagcgtggagatcgagtgggagctgcagaaggagaacagcaaacgctggaatcccgaaattcagtacacttccaactacaacaagtctgttaatgtggactttactgtggacactaatggtgtgtattcagagcctcgccccattggcaccagatacctgactcgtaatctgtaa

SEQ ID NO: 244 - protein, 736 aa, synthetic construct
  REGION 1..736: note = source = /note="Description of Artificial Sequence: Synthetic polypeptide"
MAADGYLPDWLEDTLSEGIRQWWKLKPGPPPPKPAERHKDDSRGLVLPGYKYLGPFNGLDKGEPVNEADAAALEHDKAYDRQLDSGDNPYLKYNHADAEFQERLKEDTSFGGNLGRAVFQAKKRVLEPLRPGLRKPVKTAPGKKRPVEHSPVEPDSSSGTGKAGQQPARKRLNFGQTGDADSVPDPQPLGQPPAAPSGLGSTTMATGSGAPMADNNEGADGVGNSSGNWHCDSQWLDDRVIATSTRTWALPTYNNHLYKQISSQSGACNDNHYFGYSTPWGYFDFNRFHCHFSPRDWQRLINSNWGFRPKRLNFKLFNIQVKEVTQNDGTTTIANNLTSTVQVFTDSEYQLPYVPGSAHQGCLPPFPADVFMVPQYGYLTLNNGSQAVGRSSFYCLEYFPSQMLRTGNNFQFSYTFEDVPFHSSYAHCQSLDRLMNPLIDQYLYYLNKTQTNSGTLQQSRLLFSQAGPTNMSLQAKNWLPGPCYRQQRLSKQANDNNNCNFPWTAATKYHLNGRDSLVNPGPAMASHKDDEEKFFPMHGTLIFGKQGTNANDADLENVMITDEEEIRPTNPVATEQYGTVSNNLQNSNTGPTTGTVNHQGALPGMVWQDRDVYLQGPIWAKIPHTDGHFHPSPLMGGFGLKHPPPQIMIKSTPVPANPPTNFSSAKFASSITQYSTGQVSVEIEWELQKENSKRWNPEIQYTSNYNKSVNVDFTVDTNGVYSEPRPIGTRYLTRNL

SEQ ID NO: 245 - DNA, 2208 bp, synthetic construct
  misc_feature 1..2208: note = source = /note="Description of Artificial Sequence: Synthetic polynucleotide"
  source 1..2208: mol_type = other DNA
atggctgccgatggttatcttccagattggctcgaggacactctctctgaaggaataagacagtggtggaagctcaaacctggcccaccaccaccaaagcccgcagagcggcataaggacgacagcaggggtcttgtgcttcctgggtacaagtacctcggacccttcaacggactcgacaagggagagccggtcaacgaggcagacgccgcggccctcgagcacgacaaggcctacgaccggcagctcgacagcggagacaacccgtacctcaagtacaaccacgccgacgcggagtttcaggagcgccttaaagaggatacgtcttttgggggcaacctcggacgagcagtcttccaggcaaaaaagagggttctggaacctctgggcctggttgaggagcctgttaagacggctccgggaaaaaagaggccggtagagcactctcctgcagagccagattcctcctccggaactggaaagtcgggcaaccagcctgcaagaaagagattgaatttcggtcagactggagactcagactccgtacctgacccccagcctctcggacagccaccagcagccccctctggtctgggaactaatacgatggctacaggcagtggcgcaccaatggcagacaataacgagggcgccgacggagtgggtaattcctcgggaaattggcattgcgattccacatggatgggcgacagagtcatcaccaccagcacccgaacctgggccctgcccacctacaacaaccatctgtacaagcaaatatccagccagtctggagccagcaacgacaatcactactttggctacagcaccccctgggggtattttgacttcaacagattccactgccacttttcaccacgtgactggcaaagactcatcaacaacaactggggattccgacccaagagactcaacttcaagctctttaacattcaagtcaaagaggtcacgcagaatgacggtacgacgacgattgccaataaccttaccagcacggttcaggtgtttactgactcggagtaccagctcccgtacgtcctcggctcggcgcatcaaggatgcctcccgccgttcccagcagacgtcttcatggtgccacagtatggatacctcaccctgaacaacgggagtcaggcagtaggacgctcttcattttactgcctagagtactttccttctcagatgctgcgtaccggaaacagctttaccttcagctacacctttgaggacgttcctttccacagcagctacgctcacagccagagtttggaccgtctcatgaatcctctcatcgaccagtacctgtattacttgagcagaacaaacactccaagcggaaccaccacgcagtccaggcttcagttttctcaggccggagcgagtgacattcgggaccagtctaggaactggcttcctggaccctgttaccgtcagcagcgagtatcaaagacatctgcggataacaacaacagtgaatactcgtggactggagctaccaagtaccacctcaatggcagagactctctggtgaatccgggcccggccatggccagccacaaagacgatgaagaaaagttctttcctcagagcggggttcttatctttgggaagcaaggctcagagaaaacaaatgtggatattgaaaaggtcatgattacagacgaagaggaaatcaggaccaccaatcccgtggctacggagcagtatggttctgtatctaccaacctccagagcggcaacacacaagcagctaccgcagatgtcaacacacaaggcgttcttccaggcatggtctggcaagacagagacgtgtacctgcaggggcctatttgggcaaagattccacacacggacggacattttcacccctctcccctcatgggcggatttggacttaaacaccctcctccacagattctcatcaagaacaccccggtacctgcgaatccttcgaccaccttcagtgcggcaaagtttgcttccttcattacacagtactccacggggcaggtcagcgtggagatcgagtgggagctgcagaaggagaacagcaaacgctggaatcccgagatccagtacacttccaactacaacaagtctgttaatgtggactttactgtggacactaatggcgtgtattcagagcctcgccccattggcaccagatacctgactcgtaatctgtaa

SEQ ID NO: 246 - protein, 735 aa, synthetic construct
  REGION 1..735: note = source = /note="Description of Artificial Sequence: Synthetic polypeptide"
MAADGYLPDWLEDTLSEGIRQWWKLKPGPPPPKPAERHKDDSRGLVLPGYKYLGPFNGLDKGEPVNEADAAALEHDKAYDRQLDSGDNPYLKYNHADAEFQERLKEDTSFGGNLGRAVFQAKKRVLEPLGLVEEPVKTAPGKKRPVEHSPAEPDSSSGTGKSGNQPARKRLNFGQTGDSDSVPDPQPLGQPPAAPSGLGTNTMATGSGAPMADNNEGADGVGNSSGNWHCDSTWMGDRVITTSTRTWALPTYNNHLYKQISSQSGASNDNHYFGYSTPWGYFDFNRFHCHFSPRDWQRLINNNWGFRPKRLNFKLFNIQVKEVTQNDGTTTIANNLTSTVQVFTDSEYQLPYVLGSAHQGCLPPFPADVFMVPQYGYLTLNNGSQAVGRSSFYCLEYFPSQMLRTGNSFTFSYTFEDVPFHSSYAHSQSLDRLMNPLIDQYLYYLSRTNTPSGTTTQSRLQFSQAGASDIRDQSRNWLPGPCYRQQRVSKTSADNNNSEYSWTGATKYHLNGRDSLVNPGPAMASHKDDEEKFFPQSGVLIFGKQGSEKTNVDIEKVMITDEEEIRTTNPVATEQYGSVSTNLQSGNTQAATADVNTQGVLPGMVWQDRDVYLQGPIWAKIPHTDGHFHPSPLMGGFGLKHPPPQILIKNTPVPANPSTTFSAAKFASFITQYSTGQVSVEIEWELQKENSKRWNPEIQYTSNYNKSVNVDFTVDTNGVYSEPRPIGTRYLTRNL

SEQ ID NO: 247 - DNA, 2211 bp, synthetic construct; identical to SEQ ID NO: 137
  misc_feature 1..2211: note = source = /note="Description of Artificial Sequence: Synthetic polynucleotide"
  source 1..2211: mol_type = other DNA

SEQ ID NO: 248 - protein, 736 aa, synthetic construct
  REGION 1..736: note = source = /note="Description of Artificial Sequence: Synthetic polypeptide"
MAADGYLPDWLEDTLSEGIRQWWKLKPGPPPPKPAERHKDDSRGLVLPGYKYLGPGNGLDKGEPVNAADAAALEHDKAYDQQLKAGDNPYLKYNHADAEFQERLKEDTSFGGNLGRAVFQAKKRLLEPLGLVEEAAKTAPGKKRPVEQSPQEPDSSAGIGKSGSQPAKKKLNFGQTGDTESVPDPQPIGEPPAAPSGVGSLTMASGGGAPVADNNEGADGVGSSSGNWHCDSQWLGDRVITTSTRTWALPTYNNHLYKQISNSTSGGSSNDNAYFGYSTPWGYFDFNRFHCHFSPRDWQRLINNNWGFRPKRLNFKLFNIQVKEVTDNNGVKTIANNLTSTVQVFTDSDYQLPYVLGSAHEGCLPPFPADVFMIPQYGYLTLNDGGQAVGRSSFYCLEYFPSQMLRTGNNFQFSYEFENVPFHSSYAHSQSLDRLMNPLIDQYLYYLSKTINGSGQNQQTLKFSVAGPSNMAVQGRNYIPGPSYRQQRVSTTVTQNNNSEFAWPGASSWALNGRNSLMNPGPAMASHKEGEDRFFPLSGSLIFGKQGTGRDNVDADKVMITNEEEIKTTNPVATESYGQVATNHQSAQAQAQTGWVQNQGILPGMVWQDRDVYLQGPIWAKIPHTDGNFHPSPLMGGFGMKHPPPQILIKNTPVPADPPTAFNKDKLNSFITQYSTGQVSVEIEWELQKENSKRWNPEIQYTSNYYKSNNVEFAVSTEGVYSEPRPIGTRYLTRNL

SEQ ID NO: 249 - DNA, 2211 bp, synthetic construct
  misc_feature 1..2211: note = source = /note="Description of Artificial Sequence: Synthetic polynucleotide"
  source 1..2211: mol_type = other DNA
atggctgccgatggttatcttccagattggctcgaggacactctctctgaaggaataagacagtggtggaagctcaaacctggcccaccaccaccaaagcccgcagagcggcataaggacgacagcaggggtcttgtgcttcctgggtacaagtacctcggacccggcaacggactcgacaagggggagccggtcaacgcagcagacgcggcggccctcgagcacgacaaggcctacgaccagcagctcaaggccggagacaacccgtacctcaagtacaaccacgccgacgccgagttccaggagcggctcaaagaagatacgtcttttgggggcaacctcgggcgagcagtcttccaggccaaaaagaggcttcttgaacctcttggtctggttgaggaagcggctaagacggctcctggaaagaagaggcctgtagagcagtctcctcaggaaccggactcctccgcgggtattggcaaatcgggttcacagcccgctaaaaagaaactcaatttcggtcagactggcgacacagagtcagtccccgaccctcaaccaatcggagaacctcccgcagccccctcaggtgtgggatctcttacaatggcttcaggtggtggcgcaccagtggcagacaataacgaaggtgccgatggagtgggtagttcctcgggaaattggcattgcgattcccaatggctgggggacagagtcatcaccaccagcacccgaacctgggccctgcccacctacaacaatcacctctacaagcaaatctccaacagcacatctggaggatcttcaaatgacaacgcctacttcggctacagcaccccctgggggtattttgacttcaacagattccactgccacttctcaccacgtgactggcagcgactcatcaacaacaactggggattccggcctaagcgactcaacttcaagctcttcaacattcaggtcaaagaggttacggacaacaatggagtcaagaccatcgccaataaccttaccagcacggtccaggtcttcacggactcagactatcagctcccgtacgtgctcgggtcggctcacgagggctgcctcccgccgttcccagcggacgttttcatgattcctcagtacgggtatctgacgcttaatgatgggagccaggccgtgggtcgttcgtccttttactgcctggaatatttcccgtcgcaaatgctaagaacgggtaacaacttccagttcagctacgagtttgagaacgtacctttccatagcagctacgctcacagccaaagcctggaccgactaatgaatccactcatcgaccaatacttgtactatctctcaaagactattaacggttctggacagaatcaacaaacgctaaaattcagcgtggccggacccagcaacatggctgtccagggaagaaactacatacctggacccagctaccgacaacaacgtgtctcaaccactgtgactcaaaacaacaacagcgaatttgcttggcctggagcttcttcttgggctctcaatggacgtaatagcttgatgaatcctggacctgctatggccagccacaaagaaggagaggaccgtttctttcctttgtctggatctttaatttttggcaaacaaggaactggaagagacaacgtggatgcggacaaagtcatgataaccaacgaagaagaaattaaaactactaacccggtagcaacggagtcctatggacaagtggccacaaaccaccagagtgcccaagcacaggcgcagaccggctgggttcaaaaccaaggaatacttccgggtatggtttggcaggacagagatgtgtacctgcaaggacccatttgggccaaaattcctcacacggacggcaactttcacccttctccgctaatgggagggtttggaatgaagcacccgcctcctcagatcctcatcaaaaacacacctgtacctgcggatcctccaacggctttcaataaggacaagctgaactctttcatcacccagtattctactggccaagtcagcgtggagattgagtgggagctgcagaaggaaaacagcaagcgctggaacccggagatccagtacacttccaactattacaagtctaataatgttgaatttgctgttaatactgaaggtgtatatagtgaaccccgccccattggcaccagatacctgactcgtaatctgtaa

SEQ ID NO: 250 - protein, 736 aa, synthetic construct
  REGION 1..736: note = source = /note="Description of Artificial Sequence: Synthetic polypeptide"
MAADGYLPDWLEDTLSEGIRQWWKLKPGPPPPKPAERHKDDSRGLVLPGYKYLGPGNGLDKGEPVNAADAAALEHDKAYDQQLKAGDNPYLKYNHADAEFQERLKEDTSFGGNLGRAVFQAKKRLLEPLGLVEEAAKTAPGKKRPVEQSPQEPDSSAGIGKSGSQPAKKKLNFGQTGDTESVPDPQPIGEPPAAPSGVGSLTMASGGGAPVADNNEGADGVGSSSGNWHCDSQWLGDRVITTSTRTWALPTYNNHLYKQISNSTSGGSSNDNAYFGYSTPWGYFDFNRFHCHFSPRDWQRLINNNWGFRPKRLNFKLFNIQVKEVTDNNGVKTIANNLTSTVQVFTDSDYQLPYVLGSAHEGCLPPFPADVFMIPQYGYLTLNDGSQAVGRSSFYCLEYFPSQMLRTGNNFQFSYEFENVPFHSSYAHSQSLDRLMNPLIDQYLYYLSKTINGSGQNQQTLKFSVAGPSNMAVQGRNYIPGPSYRQQRVSTTVTQNNNSEFAWPGASSWALNGRNSLMNPGPAMASHKEGEDRFFPLSGSLIFGKQGTGRDNVDADKVMITNEEEIKTTNPVATESYGQVATNHQSAQAQAQTGWVQNQGILPGMVWQDRDVYLQGPIWAKIPHTDGNFHPSPLMGGFGMKHPPPQILIKNTPVPADPPTAFNKDKLNSFITQYSTGQVSVEIEWELQKENSKRWNPEIQYTSNYYKSNNVEFAVNTEGVYSEPRPIGTRYLTRNL

SEQ ID NO: 251 - DNA, 2208 bp, synthetic construct
  misc_feature 1..2208: note = source = /note="Description of Artificial Sequence: Synthetic polynucleotide"
  source 1..2208: mol_type = other DNA
atggctgccgatggttatcttccagattggctcgaggacactctctctgaaggaataagacagcggtggaagctcaaacctggcccaccaccaccagagcccgcagagcggcataaggacgacagcaggggtcttgtgcttcctgggtacaagtacctcggacccttcaacggactcgacaagggagagccggtcaacgaggcagacgccgcggccctcgagcacgacaaagcctacgaccggcagctcgacagcggagacaacccgtacctcaagtacaaccacgccgacgcggagtttcaggagcgccttaaagaagatacgtcttttgggggcaacctcggacgagcagtcttccaggcgaaaaagagggtacttgaacctctgggcctggttgaggaacctgttaagacggctccgggaaaaaagaggccggtagagcactctcctgtggagccagactcctcctcgggaaccggaaaggcgggccagcagcctgcaagaaaaagattgaattttggtcagactggagacgcagactcagtacctgacccccagcctctcggacagccaccagcagccccctctggtctgggaactaatacgatggctacaggcagtggcgcaccaatggcagacaataacgagggcgccgacggagtgggtaattcctcgggaaattggcattgcgattccacatggatgggcgacagagtcatcaccaccagcacccgaacctgggccctgcccacctacaacaaccacctctacaaacaaatttccagccaatcaggagcctcgaacgacaatcactactttggctacagcaccccttgggggtattttgacttcaacagattccactgccacttttcaccacgtgactggcaaagactcatcaacaacaactggggattccgacccaagagactcaacttcaagctctttaacattcaagtcaaagaggtcacgcagaatgacggtacgacgacgattgccaataaccttaccggcacggttcaggtgtttactgactcggagtaccagctcccgtacgtcctcggctcggcgcatcaaggatgcctcccgccgttcccagcagacgtcttcatggtgccacagtatggatacctcaccctgaacaacgggagtcaggcagtaggacgctcttcattttactgcctggagtactttccttctcagatgctgcgtaccggaaacaactttaccttcagctacacttttgaggacgttcctttccacagcagctacgctcacagccagagtctgggccgtctcatgaatcctctcatcgaccagtacctgtattacttgagcagaacaaacactccaagtggaaccaccacgcagtcaaggcttcagttttctcaggccggagcgagtgacattcgggaccagtctaggaactggcttcctggaccctgttaccgccagcagcgagtatcaaagacatctgcggataacaacaacagtgaatactcgtggactggagctaccaagtaccacctcaatggcagagactctctggtgaatccgggcccggccatggcaagccacaaggacgatgaagaaaagttttttcctcagagcggggttctcatctttgggaagcaaggctcagagaaaacaaatgtggacattgaaaaggtcatgattacagacgaagaggaaatcaggacaaccaatcccgtggctacggagcagtatggttctgtatctaccaacctccagagaggcaacagacaagcagctaccgcagatgtcaacacacaaggcgttcttccaggcatggtctggcaggacagagatgtgtaccttcaggggcccatctgggcaaagattccacacacggacggacattttcacccctctcccctcatgggtggattcggacttaaacaccctcctccacagattctcatcaagaacaccccggtacctgcgaatccttcgaccaccttcagtgcggcaaagtttgcttccttcatcacacagtactccacgggacaggtcagcgtggagatcgagtgggagctgcagaaggaaaacagcaaacgctggaatcccgaaattcagtacacttccaactacaacaagtctgttaatgtggactttactgtggacactaatggcgtgtattcagagcctcgccccattggcaccagatacctgactcgtaatctgtaa

SEQ ID NO: 252 - protein, 735 aa, synthetic construct
  REGION 1..735: note = source = /note="Description of Artificial Sequence: Synthetic polypeptide"
MAADGYLPDWLEDTLSEGIRQRWKLKPGPPPPEPAERHKDDSRGLVLPGYKYLGPFNGLDKGEPVNEADAAALEHDKAYDRQLDSGDNPYLKYNHADAEFQERLKEDTSFGGNLGRAVFQAKKRVLEPLGLVEEPVKTAPGKKRPVEHSPVEPDSSSGTGKAGQQPARKRLNFGQTGDADSVPDPQPLGQPPAAPSGLGTNTMATGSGAPMADNNEGADGVGNSSGNWHCDSTWMGDRVITTSTRTWALPTYNNHLYKQISSQSGASNDNHYFGYSTPWGYFDFNRFHCHFSPRDWQRLINNNWGFRPKRLNFKLFNIQVKEVTQNDGTTTIANNLTGTVQVFTDSEYQLPYVLGSAHQGCLPPFPADVFMVPQYGYLTLNNGSQAVGRSSFYCLEYFPSQMLRTGNNFTFSYTFEDVPFHSSYAHSQSLGRLMNPLIDQYLYYLSRTNTPSGTTTQSRLQFSQAGASDIRDQSRNWLPGPCYRQQRVSKTSADNNNSEYSWTGATKYHLNGRDSLVNPGPAMASHKDDEEKFFPQSGVLIFGKQGSEKTNVDIEKVMITDEEEIRTTNPVATEQYGSVSTNLQRGNRQAATADVNTQGVLPGMVWQDRDVYLQGPIWAKIPHTDGHFHPSPLMGGFGLKHPPPQILIKNTPVPANPSTTFSAAKFASFITQYSTGQVSVEIEWELQKENSKRWNPEIQYTSNYNKSVNVDFTVDTNGVYSEPRPIGTRYLTRNL

SEQ ID NO: 253 - DNA, 2208 bp, synthetic construct
  misc_feature 1..2208: note = source = /note="Description of Artificial Sequence: Synthetic polynucleotide"
  source 1..2208: mol_type = other DNA
atggctgccgatggttatcttccagattggctcgaggacactctctctgaaggaataagacagcggtggaagctcaaacctggcccaccaccaccagagcccgcagagcggcataaggacgacagcaggggtcttgtgcttcctgggtacaagtacctcggacccttcaacggactcgacaagggagagccggtcaacgaggcagacgccgcggccctcgagcacgacaaagcctacgaccggcagctcgacagcggagacaacccgtacctcaagtacaaccacgccgacgcggagtttcaggagcgccttaaagaagatacgtcctttgggggcaacctcggacgagcagtcttccaggcgaaaaagagggtacttgaacctctgggcctggttgaggaacctgttaagacggctccgggaaaaaagaggccggtagagcactctcctgtggagccagactcctcctcgggaaccggaaaggcgggccagcagcctgcaagaaaaagattgaattttggtcagactggagacgcagactcagtacctgacccccagcctctcggacagccaccagcagccccctctggtctgggaactaatacgatggctacaggcagtggcgcaccaatggcagacaataacgagggcgccgacggagtgggtaattcctcgggaaattggcattgcgattccacatggatgggcgacagagtcatcaccaccagcacccgaacctgggccctgcccacctacaacaaccacctctacaaacaaatttccagccaatcaggagcctcgaacgacaatcactactttggctacagcaccccttgggggtattttgacttcaacagattccactgccacttttcaccacgtgactggcaaagactcatcaacaacaactggggattccgacccaagagactcaacttcaagctctttaacattcaagtcaaagaggtcacgcagaatgacggtacgacgacgattgccaataaccttaccagcacggttcaggtgtttactgactcggagtaccagctcccgtacgtcctcggctcggcgcatcaaggatgcctcccgccgttcccagcagacgtcttcatggtgccacagtatggatacctcaccctgaacaacgagagtcaggcagtaggacgctcttcattttactgcctggagtactttccttctcagatgctgcgtaccggaaacaactttaccttcagctacacttttgaggacgttcctttccacagcagctacgctcacagccagagtctgggccgtctcatgaatcctctcatcgaccagtacctgtattacttgagcagaacaaacactccaagtggaaccaccacgcagtcaaggcttcagttttctcaggccggagcgagtgacattcgggaccagtctaggaactggcttcctggaccctgttaccgccagcagcgagtatcaaagacatctgcggataacaacaacagtgaatactcgtggactggagctaccaagtaccacctcaatggcagagactctctggtgaatccgggcccggccatggcaagccacaaggacgatgaagaaaagttttttcctcagagcggggttctcatctttgggaagcaaggctcagagaaaacaaatgtggacattgaaaaggtcatgattacagacgaagaggaaatcaggacaaccaatcccgtggctacggagcagtatggttctgtatctaccaacctccagagaggcaacagacaagcagctaccgcagatgtcaacacacaaggcgttcttccaggcatggtctggcaggacagagatgtgtaccttcaggggcccatctgggcaaagattccacacacggacggacattttcacccctctcccctcatgggtggattcggacttaaacaccctcctccacagattctcatcaagaacaccccggtacctgcgaatccttcgaccaccttcagtgcggcaaagtttgcttccttcatcacacagtactccacgggacaggtcagcgtggagatcgagtgggagctgcagaaggaaaacagcaaacgctggaatcccgaaattcagtacacttccaactacaacaagtctgttaatgtggactttactgtggacactaatggcgtgtattcagagcctcgccccattggcaccagatacctgactcgtaatctgtaa

SEQ ID NO: 254 - protein, 735 aa, synthetic construct
  REGION 1..735: note = source = /note="Description of Artificial Sequence: Synthetic polypeptide"
MAADGYLPDWLEDTLSEGIRQRWKLKPGPPPPEPAERHKDDSRGLVLPGYKYLGPFNGLDKGEPVNEADAAALEHDKAYDRQLDSGDNPYLKYNHADAEFQERLKEDTSFGGNLGRAVFQAKKRVLEPLGLVEEPVKTAPGKKRPVEHSPVEPDSSSGTGKAGQQPARKRLNFGQTGDADSVPDPQPLGQPPAAPSGLGTNTMATGSGAPMADNNEGADGVGNSSGNWHCDSTWMGDRVITTSTRTWALPTYNNHLYKQISSQSGASNDNHYFGYSTPWGYFDFNRFHCHFSPRDWQRLINNNWGFRPKRLNFKLFNIQVKEVTQNDGTTTIANNLTSTVQVFTDSEYQLPYVLGSAHQGCLPPFPADVFMVPQYGYLTLNNESQAVGRSSFYCLEYFPSQMLRTGNNFTFSYTFEDVPFHSSYAHSQSLGRLMNPLIDQYLYYLSRTNTPSGTTTQSRLQFSQAGASDIRDQSRNWLPGPCYRQQRVSKTSADNNNSEYSWTGATKYHLNGRDSLVNPGPAMASHKDDEEKFFPQSGVLIFGKQGSEKTNVDIEKVMITDEEEIRTTNPVATEQYGSVSTNLQRGNRQAATADVNTQGVLPGMVWQDRDVYLQGPIWAKIPHTDGHFHPSPLMGGFGLKHPPPQILIKNTPVPANPSTTFSAAKFASFITQYSTGQVSVEIEWELQKENSKRWNPEIQYTSNYNKSVNVDFTVDTNGVYSEPRPIGTRYLTRNL

SEQ ID NO: 255 - DNA, 2208 bp, synthetic construct
  misc_feature 1..2208: note = source = /note="Description of Artificial Sequence: Synthetic polynucleotide"
  source 1..2208: mol_type = other DNA
atggctgccgatggttatcttccagattggctcgaggacactctctctgaaggaataagacagcggtggaagctcaaacctggcccaccaccaccagagcccgcagagcggcataaggacgacagcaggggtcttgtgcttcctgggtacaagtacctcggacccttcaacggactcgacaagggagagccggtcaacgaggcagacgccgcggccctcgagcacgacaaagcctacgaccggcagctcgacagcggagacaacccgtacctcaagtacaaccacgccgacgcggagtttcaggagcgccttaaagaagatacgtcttttgggggcaacctcggacgagcagtcttccaggcgaaaaagagggtacttgaacctctgggcctggttgaggaacctgttaagacggctccgggaaaaaagaggccggtagagcactctcctgtggagccagactcctcctcgggaaccggaaaggcgggccagcagcctgcaagaaaaagattgaattttggtcagactggagacgcagactcagtacctgacccccagcctctcggacagccaccagcagccccctctggtctgggaactaatacgatggctacaggcagtggcgcaccaatggcagacaataacgagggcgccgacggagtgggtaattcctcgggaaattggcattgcgattccacatggatgggcgacagagtcatcaccaccagcacccgaacctgggccctgcccacctacaacaaccacctctacaaacaaatttccagccaatcaggagcctcgaacgacaatcactactttggctacagcaccccttgggggtattttgacttcaacagattccactgccacttttcaccacgtgactggcaaagactcatcaacaacaactggggattccgacccaagagactcaacttcaagctctttaacattcaagtcaaagaggtcacgcagaatgacggtacgacgacgattgccaataaccttaccagcacggttcaggtgtttactgactcggagtaccagctcccgtacgtcctcggctcggcgcatcaaggatgcctcccgccgttcccagcagacgtcttcatggtaccacagtatggatacctcaccctgaacaacgggagtcaggcagtaggacgctcttcattttactgcctggagtactttccttctcagatgctgcgtaccggaaacaactttaccttcagctacacttttgaggacgttcctttccacagcagctacgctcacagccagagtctgggccgtctcatgaatcctctcatcgaccagtacctgtattacttgagcagaacaaacactccaagtggaaccaccacgcagtcaaggcttcagttttctcaggccggagcgagtgacattcgggaccagtctaggaactggcttcctggaccctgttaccgccagcagcgagtatcaaagacatctgcggataacaacaacagtgaatactcgtggactggagctaccaagtaccacctcaatggcagagactctctggtgaatccgggcccggccatggcaagccacaaggacgatgaagaaaagttttttcctcagagcggggttctcatctttgggaagcaaggctcagagaaaacaaatgtggacattgaaaaggtcatgattacagacgaagaggaaatcaggacaaccaatcccgtggctacggagcagtatggttctgtatctaccaacctccagagaggcaacagacaagcagctaccgcagatgtcaacacacaaggcgttcttccaggcatggtctggcaggacagagatgtgtaccttcaggggcccatctgggcaaagattccacacacggacggacattttcacccctctcccctcatgggtggattcggacttaaacaccctcctccacagattctcatcaagaacaccccggtacctgcgaatccttcgaccaccttcagtgcggcaaagtttgcttccttcatcacacagtactccacgggacaggtcagcgtggagatcgagtgggagctgcagaaggaaaacagcaaacgctggaatcccgaaattcagtacacttccaactacaacaagtctgttaatgtggactttactgtggacactaatggcgtgtattcagagcctcgccccattggcaccagatacctgactcgtaatctgtaa

SEQ ID NO: 256 - protein, 735 aa, synthetic construct
  REGION 1..735: note = source = /note="Description of Artificial Sequence: Synthetic polypeptide"
MAADGYLPDWLEDTLSEGIRQRWKLKPGPPPPEPAERHKDDSRGLVLPGYKYLGPFNGLDKGEPVNEADAAALEHDKAYDRQLDSGDNPYLKYNHADAEFQERLKEDTSFGGNLGRAVFQAKKRVLEPLGLVEEPVKTAPGKKRPVEHSPVEPDSSSGTGKAGQQPARKRLNFGQTGDADSVPDPQPLGQPPAAPSGLGTNTMATGSGAPMADNNEGADGVGNSSGNWHCDSTWMGDRVITTSTRTWALPTYNNHLYKQISSQSGASNDNHYFGYSTPWGYFDFNRFHCHFSPRDWQRLINNNWGFRPKRLNFKLFNIQVKEVTQNDGTTTIANNLTSTVQVFTDSEYQLPYVLGSAHQGCLPPFPADVFMVPQYGYLTLNNGSQAVGRSSFYCLEYFPSQMLRTGNNFTFSYTFEDVPFHSSYAHSQSLGRLMNPLIDQYLYYLSRTNTPSGTTTQSRLQFSQAGASDIRDQSRNWLPGPCYRQQRVSKTSADNNNSEYSWTGATKYHLNGRDSLVNPGPAMASHKDDEEKFFPQSGVLIFGKQGSEKTNVDIEKVMITDEEEIRTTNPVATEQYGSVSTNLQRGNRQAATADVNTQGVLPGMVWQDRDVYLQGPIWAKIPHTDGHFHPSPLMGGFGLKHPPPQILIKNTPVPANPSTTFSAAKFASFITQYSTGQVSVEIEWELQKENSKRWNPEIQYTSNYNKSVNVDFTVDTNGVYSEPRPIGTRYLTRNL

SEQ ID NO: 257 - DNA, 2208 bp, synthetic construct
  misc_feature 1..2208: note = source = /note="Description of Artificial Sequence: Synthetic polynucleotide"
  source 1..2208: mol_type = other DNA
atggctgccgatggttatcttccagattggctcgaggacactctctctgaaggaataagacagcggtggaagctcaaacctggcccaccaccaccagagcccgcagagcggcataaggacgacagcaggggtcttgtgcttcctgggtacaagtacctcggacccttcaacggactcgacaagggagagccggtcaacgaggcagacgccgcggccctcgagcacgacaaagcctacgaccggcagctcgacagcggagacaacccgtacctcaagtacaaccacgccgacgcggagtttcaggagcgccttaaagaagatacgtcttttgggggcaacctcggacgagcagtcttccaggcgaaaaagagggtactcgaacctctgggcctggttgaggaacctgttaagacggctccgggaaaaaagaggccggtagagcactctcctgtggagccagactcctcctcgggaaccggaaaggcgggccagcagcctgcaagaaaaagattgaattttggtcagactggagacgcagactcagtacctgacccccagcctctcggacagccaccagcagccccctctggtctgggaactaatacgatggctacaggcagtggcgcaccaatggcagacaataacgagggcgccgacggagtgggtaattcctcgggaaattggcattgcgattccacatggatgggcgacagagtcatcaccaccagcacccgaacctgggccctgcccacctacaacaaccacctctacaaacaaatttccagccaatcaggagcctcgaacgacaatcactactttggctacagcaccccttgggggtattttgacttcaacagattccactgccacttttcaccacgtgactggcaaagactcatcaacaacaactggggattccgacccaagagactcaacttcaagctctttaacattcaagtcaaagaggtcacgcagaatgacggtacgacgacgattgccaataaccttaccagcacggttcaggtgtttactgactcggagtaccagctcccgtacgtcctcggctcggcgcatcaaggatgcctcccgccgttcccagcagacgtcttcatggtgccacagtatggatacctcaccctgaacaacgggagtcaggcagcaggacgctcttcattttactgcctggagtactttccttctcagatgctgcgtaccggaaacaactttaccttcagctacacttttgaggacgttcctttccacagcagctacgctcacagccagagtctgggccgtctcatgaatcctctcatcgaccagtacctgtattacttgagcagaacaaacactccaagtggaaccaccacgcagtcaaggcttcagttttctcaggccggagcgagtgacattcgggaccagtctaggaactggcttcctggaccctgttaccgccagcagcgagtatcaaagacatctgcggataacaacaacagtgaatactcgtggactggagctaccaagtaccacctcaatggcagagactctctggtgaatccgggcccggccatggcaagccacaaggacgatgaagaaaagttttttcctcagagcggggttctcatctttgggaagcaaggctcagagaaaacaaatgtggacattgaaaaggtcatgattacagacgaagaggaaatcaggacaaccaatcccgtggctacggagcagtatggttctgtatctaccaacctccagagaggcaacagacaagcagctaccgcagatgtcaacacacaaggcgttcttccaggcatggtctggcaggacagagatgtgtaccttcaggggcccatctgggcaaagattccacacacggacggacattttcacccctctcccctcatgggtggattcggacttaaacaccctcctccacagattctcatcaagaacaccccggtacctgcgaatccttcgaccaccttcagtgcggcaaagtttgcttccttcatcacacagtactccacgggacaggtcagcgtggagatcgagtgggagctgcagaaggaaaacagcaaacgctggaatcccgaaattcagtacacttccaactacaacaagtccgttaatgtggactttactgtggacactaatggcgtgtattcagagcctcgccccattggcaccagatacctgactcgtaatctgtaa

SEQ ID NO: 258 - protein, 735 aa, synthetic construct
  REGION 1..735: note = source = /note="Description of Artificial Sequence: Synthetic polypeptide"
MAADGYLPDWLEDTLSEGIRQRWKLKPGPPPPEPAERHKDDSRGLVLPGYKYLGPFNGLDKGEPVNEADAAALEHDKAYDRQLDSGDNPYLKYNHADAEFQERLKEDTSFGGNLGRAVFQAKKRVLEPLGLVEEPVKTAPGKKRPVEHSPVEPDSSSGTGKAGQQPARKRLNFGQTGDADSVPDPQPLGQPPAAPSGLGTNTMATGSGAPMADNNEGADGVGNSSGNWHCDSTWMGDRVITTSTRTWALPTYNNHLYKQISSQSGASNDNHYFGYSTPWGYFDFNRFHCHFSPRDWQRLINNNWGFRPKRLNFKLFNIQVKEVTQNDGTTTIANNLTSTVQVFTDSEYQLPYVLGSAHQGCLPPFPADVFMVPQYGYLTLNNGSQAAGRSSFYCLEYFPSQMLRTGNNFTFSYTFEDVPFHSSYAHSQSLGRLMNPLIDQYLYYLSRTNTPSGTTTQSRLQFSQAGASDIRDQSRNWLPGPCYRQQRVSKTSADNNNSEYSWTGATKYHLNGRDSLVNPGPAMASHKDDEEKFFPQSGVLIFGKQGSEKTNVDIEKVMITDEEEIRTTNPVATEQYGSVSTNLQRGNRQAATADVNTQGVLPGMVWQDRDVYLQGPIWAKIPHTDGHFHPSPLMGGFGLKHPPPQILIKNTPVPANPSTTFSAAKFASFITQYSTGQVSVEIEWELQKENSKRWNPEIQYTSNYNKSVNVDFTVDTNGVYSEPRPIGTRYLTRNL

SEQ ID NO: 259 - protein, 738 aa, synthetic construct; identical to SEQ ID NO: 101
  REGION 1..738: note = source = /note="Description of Artificial Sequence: Synthetic polypeptide"

SEQ ID NO: 260 - DNA, 2217 bp, synthetic construct
  misc_feature 1..2217: note = source = /note="Description of Artificial Sequence: Synthetic polynucleotide"
  source 1..2217: mol_type = other DNA
atggctgctgacggttatcttccagattggctcgaggacaacctctctgagggcattcgcgagtggtgggacctgaaacctggagcccccaagcccaaggccaaccagcagaagcaggacgacggccggggtctggtgcttcctggctacaagtacctcggacccttcaacggactcgacaagggggagcccgtcaacgcggcggacgcagcggccctcgagcacgacaaggcctacgaccagcagctcaaagcgggtgacaatccgtacctgcggtataaccacgccgacgccgagtttcaggagcgtctgcaagaagatacgtcttttgggggcaacctcgggcgagcagtcttccaggccaagaagcgggttctcgaacctctcggtctggttgaggaagctgctaagacggctcctggaaagaagagaccggtagaaccgtcacctcagcgttcccccgactcctccacgggcatcggcaagaaaggccagcagcccgctaaaaagagactgaactttggtcagactggcgactcagagtcagtccccgaccctcaaccaatcggagaaccaccagcaggcccctctggtctgggatctggtacaatggctgcaggcggtggcgctccaatggcagacaataacgaaggcgccgacggagtgggtagttcctcaggaaattggcattgcgattccacatggctgggcgacagagtcatcaccaccagcacccgaacctgggccctgcccacctacaacaaccacctctacaagcaaatatccaatgggacatcgggaggaagcaccaacgacaacacctacttcggctacagcaccccctgggggtattttgacttcaacagattccactgccacttctcaccacgtgactggcagcgactcatcaacaacaactggggattccggccaaaaagactcagcttcaagctcttcaacatccaggtcaaggaggtcacgcagaatgaaggcaccaagaccatcgccaataaccttaccagcacgattcaggtatttacggactcggaataccagctgccgtacgtcctcggctccgcgcaccagggctgcctgcctccgttcccggcggacgtcttcatgattccccagtacggctaccttacactgaacaatggaagtcaagccgtaggccgttcctccttctactgcctggaatattttccatctcaaatgctgcgaactggaaacaattttgaattcagctacaccttcgaggacgtgcctttccacagcagctacgcacacagccagagcttggaccgactgatgaatcctctcatcgaccagtacctgtactacttatccagaactcagtccacaggaggaactcaaggtacccagcaattgttattttctcaagctgggcctgcaaacatgtcggctcaggctaagaactggctacctggaccttgctaccggcagcagcgagtctctacgacactgtcgcaaaacaacaacagcaactttgcttggactggtgccaccaaatatcacctgaacggaagagactctttggtaaatcccggtgtcgccatggcaacccacaaggacgacgaggaacgcttcttcccgtcgagtggagtcctgatgttcggaaaacagggtgctggaagagacaatgtggactacagcagcgttatgctaaccagcgaagaagaaattaaaaccactaaccccgtagccacagaacaatacggtgtggtggctgacaacttgcagcaaaccaatacagggcctattgtgggaaatgtcaacagccaaggagccttacctggcatggtctggcagaaccgagacgtgtacctgcagggtcccatctgggccaagattcctcacacggacggcaacttccacccttcaccgctaatgggaggatttggactgaagcacccacctcctcagatcctgatcaagaacacgccggtacctgcggatcctccaacaacgttcagccaggcgaaattggcttccttcattacgcagtacagcaccggacaggtcagcgtggaaatcgagtgggagctgcagaaggagaacagcaaacgctggaacccagagattcagtacacttcaaactactacaaatctacaaatgtggactttgctgtcaatacagagggaacttattctgagcctcgccccattggtactcgttacctcacccgtaatctgtaa

SEQ ID NO: 261 - protein, 738 aa, synthetic construct
  REGION 1..738: note = source = /note="Description of Artificial Sequence: Synthetic polypeptide"
MAADGYLPDWLEDNLSEGIREWWDLKPGAPKPKANQQKQDDGRGLVLPGYKYLGPFNGLDKGEPVNAADAAALEHDKAYDQQLKAGDNPYLRYNHADAEFQERLQEDTSFGGNLGRAVFQAKKRVLEPLGLVEEAAKTAPGKKRPVEPSPQRSPDSSTGIGKKGQQPAKKRLNFGQTGDSESVPDPQPIGEPPAGPSGLGSGTMAAGGGAPMADNNEGADGVGSSSGNWHCDSTWLGDRVITTSTRTWALPTYNNHLYKQISNGTSGGSTNDNTYFGYSTPWGYFDFNRFHCHFSPRDWQRLINNNWGFRPKRLSFKLFNIQVKEVTQNEGTKTIANNLTSTIQVFTDSEYQLPYVLGSAHQGCLPPFPADVFMIPQYGYLTLNNGSQAVGRSSFYCLEYFPSQMLRTGNNFEFSYTFEDVPFHSSYAHSQSLDRLMNPLIDQYLYYLSRTQSTGGTQGTQQLLFSQAGPANMSAQAKNWLPGPCYRQQRVSTTLSQNNNSNFAWTGATKYHLNGRDSLVNPGVAMATHKDDEERFFPSSGVLMFGKQGAGRDNVDYSSVMLTSEEEIKTTNPVATEQYGVVADNLQQTNTGPIVGNVNSQGALPGMVWQNRDVYLQGPIWAKIPHTDGNCHPSPLMGGFGLKHPPPQILIKNTPVPADPPTTFSQAKLASFITQYSTGQVSVEIEWELQKENSKRWNPEIQYTSNYYKSTNVDFAVNTEGTYSEPRPIGTRYLTRNL

SEQ ID NO: 262 - protein, 738 aa, synthetic construct
  REGION 1..738: note = source = /note="Description of Artificial Sequence: Synthetic polypeptide"
MAADGYLPDWLEDNLSEGIREWWDLKPGAPKPKANQQKQDDGRGLVLPGYKYLGPFNGLDKGEPVNAADAAALEHDKAYDQQLKAGDNPYLRYNHADAEFQERLQEDTSFGGNLGRAVFQAKKRVLEPLGLVEEGAKTAPGKKRPVEPSPQRSPDSSTGIGKKGQQPARKRLNFGRTGDSESVPDPQPIGEPPAAPSSVGSGTMAAGGGAPMADNNEGADGVGSSSGNWHCDSTWLGDRVITTSTRTWALPTYNNHLYKQISNGTSGGSTNDNTYFGYSTPWGYLDFNRFHCHFSPRDWQRLINNNWGFRPKRLSFKLFNIQVKEVTQNEGTKTIANNLASTIQVFTDSEYQPPYVLGSAHQGCLPPFPADVFMIPQYGYLTLNNGSQAVGRSSFYCLEYFPSQMLRTGNNFSFSYTFEDVPFHSSYAHSQSLDRLMNPLIDQYLYYLSRTQSTGGTAGTQQLLFSRAGPSNMSAQARNWLPGPCYRQQRVSTTLSQNNNSNFAWTGATKYHLNGRDSLVNPGVAMATNKDDEDRFFPSSGILMFGKQGAGKDNVDYSNVMLTSEEEIKTTNPVATEQYGVVADNLQQQNTAPTVGAVNSQGALPGMVWQNRDVYLQGPIWAKIPHTDGNFHPSPLMGGFGLKHPPPQILIKNTPVPADPPTAFNQAKLNSFIAQYSTGQVSVEIEWELQKENSKRWNPEIQYTSNYYKSTNADFAVNTEGVYSEPRPIGTRYLTRNL

SEQ ID NO: 263 - DNA, 2217 bp, synthetic construct
  misc_feature 1..2217: note = source = /note="Description of Artificial Sequence: Synthetic polynucleotide"
  source 1..2217: mol_type = other DNA
atggctgccgatggttatcttccagattggctcgaggacaacctctctgagggcattcgcgagtggtgggacctgaaacctggagccccgaaacccaaagccaaccagcaaaagcaggacgacggccggggtctggtgcttcctggctacaagtacctcggacccttcaacggactcgacaagggggagcccgtcaacgcggcggacgcagcggccctcgagcacgacaaggcctacgaccagcagctcaaagcgggtgacaatccgtacctgcggtataatcacgccgacgccgagtttcaggagcgtctgcaagaagatacgtcttttgggggcaacctcgggcgagcagtcttccaggccaagaagcgggttctcgaacctctcggtctggttgaggaaggcgctaagacggctcctggaaagaagagaccggtagagccgtcaccacagcgttcccccgactcctccacgggcatcggcaagaaaggccagcagcccgccagaaagagactcaatttcggtcggactggcgactcagagtcagtccccgaccctcaacctatcggagaacctccagcagcgccctctagtgtgggatctggtacaatggctgcaggcggtggcgcaccaatggcagacaataacgaaggtgccgacggagtgggtagttcctcgggaaattggcattgcgattccacatggctgggcgacagagttatcaccaccagcacccgaacctgggccctgcccacctacaacaaccacctctacaagcaaatctccaacgggacctcgggaggcagcaccaacgacaacacctactttggctacagcaccccctgggggtatcttgactttaacagattccactgccacttctcaccacgtgactggcagcgactcatcaacaacaactggggattccggcccaagagactcagcttcaagctcttcaacatccaggtcaaagaggtcacgcagaatgaaggcaccaagaccatcgccaataacctcgccagcaccatccaggtgtttacggactcggaataccagccgccgtacgtcctcggctctgcccaccagggctgcctgcctccgttcccggcggacgtcttcatgattcctcagtacggctacctgactctcaacaacggtagtcaggccgtgggacgttcctccttctactgcctggagtacttcccctctcagatgctgagaacgggcaacaacttttccttcagctacactttcgaggacgtgcctttccacagcagctacgcgcacagccagagtttggacaggctgatgaatcctctcatcgaccagtacctgtactacctgtcaagaacccagtctacgggaggcacagcgggaacccagcagttgctgttttctcgggccgggcctagcaacatgtcggctcaggccagaaactggctgcctggaccctgctacagacagcagcgcgtctccacgacactgtcgcaaaacaacaacagcaactttgcctggactggtgccaccaagtatcatctgaacggcagagactctctggtgaatccgggcgtcgccatggcaaccaacaaggacgacgaggaccgcttcttcccatccagcggcatcctcatgtttggcaagcagggagctggaaaagacaacgtggactatagcaacgtgatgctaaccagcgaggaagaaatcaagaccaccaaccccgtggccacagaacagtatggcgtggtggctgataacctacagcagcaaaacaccgctcctactgtgggggccgtcaacagccagggagccttacctggcatggtctggcagaaccgggacgtgtacctgcagggtcctatttgggccaagattcctcacacagatggcaactttcacccgtctcctttaatgggcggctttggacttaaacatccgcctcctcagatcctcatcaaaaacactcctgttcctgcggatcctccaacagcgttcaaccaggccaagctgaattctttcatcgcgcagtacagcaccggacaagtcagcgtggagatcgagtgggagctgcagaaggagaacagcaagcgctggaacccagagattcagtatacttccaactactacaaatctacaaatgcggactttgctgttaatactgagggtgtttactctgagcctcgccccattggcactcgttacctcacccgtaatctgtaa

SEQ ID NO: 264 - DNA, 2208 bp, synthetic construct
  misc_feature 1..2208: note = source = /note="Description of Artificial Sequence: Synthetic polynucleotide"
  source 1..2208: mol_type = other DNA
atggctgccgatggttatcttccagattggctcgaggacactctctctgaaggaataagacagtggtggaagctcaaacctggcccaccaccaccaaagcccgcagagcggcataaggacgacagcaggggtcttgtgcttcctgggtacaagtacctcggacccttcaacggactcgacaagggggagccggtcaacgaggcagacgccgcggccctcgagcacgacaaggcctacgaccggcagctcgacagcggagacaacccgtacctcaagtacaaccacgccgacgcagagtttcaggagcgccttaaagaagatacgtcttttgggggcaacctcggacgagcagtcttccaggcgaaaaagagggttcttgaacctctgggcctggttgaggagcctgttaagacggctccgggaaaaaagaggccggtagagcactctcctgtggagccagactcctcctcgggaaccggaaaagcgggccagcagcctgcaagaaaaagattaaattttggtcagactggagacgcagactccgtacctgacccccagcctctcggacagccaccagcagccccctctggtctgggatctactacaatggctacaggcagtggcgcaccaatggcagacaataacgagggtgccgatggagtgggtaattcctcaggaaattggcattgcgattcccaatggctgggcgacagagtcatcaccaccagcacccgaacctgggccctgcccacatacaacaaccacctctacaagcaaatctccagccaatcaggagccagcaacgacaaccactactttggctacagcaccccctgggggtattttgacttcaacagattccactgccacttttcaccacgtgactggcaaagactcgtcaacaacaaccggggattccggcccaaaagactcaacttcaagctctttaatattcaagtcaaagaggtcacgcagaatgacggtacgacgacgattgccaataaccttaccagcacggttcaggtgtttactgactcggagtaccagctcccgtacgtcctgggctcggcgcatcaaggatgcctcccgccgtttccagcggacgtcttcatggtcccacagtatggatacctcaccctgaacaacgggagtcaggcggtaggacgctcttccttttactgcctggagtactttccttctcagatgctgcgtactggaaacaactttcagttcagctacacttttgaagacgtgcctttccacagcagctacgctcacagccagagtctggatcggctgatgaatcctctgatcgaccagtacctgtattatctgaacaagacacaaacaaatagtggaactcttcagcagtctcggctactgtttagccaagctggaccaaccaacatgtctcttcaagctaaaaactggctgcctggaccttgctacagacagcagcgtctgtcaaaacaggcaaacgacaacaacaacagcaactttccctggactgcagctacaaagtatcatctaaatggccgggactcgttggttaatccaggaccagctatggccagtcacaaggatgacgaagaaaagtttttccccatgcatggaaccctgatatttggtaaacaaggaacaaatgccaacgacgcggatttggaaaatgtcatgattacagatgaagaagaaatcagggccaccaatcccgtggctacggagcagtacgggactgtgtcaaataatttgcaaaactcaaacactggtccaactactggaactgtcaatcaccaaggagcgttacctggtatggtgtggcaggatcgagacgtgtacctgcagggacccatttgggccaagattcctcacaccgatggacactttcatccttctccactgatgggaggttttggactcaaacacccgcctcctcagatcatgatcaaaaacactcccgttccagccaatcctcccacaaacttcagttctgccaagtttgcttctttcatcacacagtattccacgggacaggtcagcgtggagatcgagtgggagctgcagaaggagaacagcaaacgctggaatcccgaaattcagtacacttccaactacaacaagtctgttaatgtggactttactgtggacactaatggtgtgtattcagagcctcgccccattggcaccagatacctgactcgtaatctgtaa

SEQ ID NO: 265 - protein, 735 aa, synthetic construct
  REGION 1..735: note = source = /note="Description of Artificial Sequence: Synthetic polypeptide"
MAADGYLPDWLEDTLSEGIRQWWKLKPGPPPPKPAERHKDDSRGLVLPGYKYLGPFNGLDKGEPVNEADAAALEHDKAYDRQLDSGDNPYLKYNHADAEFQERLKEDTSFGGNLGRAVFQAKKRVLEPLGLVEEPVKTAPGKKRPVEHSPVEPDSSSGTGKAGQQPARKRLNFGQTGDADSVPDPQPLGQPPAAPSGLGSTTMATGSGAPMADNNEGADGVGNSSGNWHCDSQWLGDRVITTSTRTWALPTYNNHLYKQISSQSGASNDNHYFGYSTPWGYFDFNRFHCHFSPRDWQRLVNNNRGFRPKRLNFKLFNIQVKEVTQNDGTTTIANNLTSTVQVFTDSEYQLPYVLGSAHQGCLPPFPADVFMVPQYGYLTLNNGSQAVGRSSFYCLEYFPSQMLRTGNNFQFSYTFEDVPFHSSYAHSQSLDRLMNPLIDQYLYYLNKTQTNSGTLQQSRLLFSQAGPTNMSLQAKNWLPGPCYRQQRLSKQANDNNNSNFPWTAATKYHLNGRDSLVNPGPAMASHKDDEEKFFPMHGTLIFGKQGTNANDADLENVMITDEEEIRATNPVATEQYGTVSNNLQNSNTGPTTGTVNHQGALPGMVWQDRDVYLQGPIWAKIPHTDGHFHPSPLMGGFGLKHPPPQIMIKNTPVPANPPTNFSSAKFASFITQYSTGQVSVEIEWELQKENSKRWNPEIQYTSNYNKSVNVDFTVDTNGVYSEPRPIGTRYLTRNL

SEQ ID NO: 266 - protein, 738 aa, synthetic construct
  REGION 1..738: note = source = /note="Description of Artificial Sequence: Synthetic polypeptide"
MAADGYLPDWLEDNLSEGIREWWDLKPGAPKPKANQQKQDDGRGLVLPGYKYLGPFNGLDKGEPVNAADAAALEHDKAYDQQLKAGDNPYLRYNHADAEFQERLQEDTSFGGNLGRAVFQAKKRVLEPLGLVEEAAKTAPGKKRPVEPSPQRSPDSSTGIGKKGQQPAKKRLSFGQTGDSESVPDPQPIGEPPAGPSGLGSGTMAAGGGAPMADNNEGADGVGSSSGNWHCDSTWLGDRVITTSTRTWALPTYNNHLYKQISNGTSGGSTNDNTYFGYSTPWGYFDFNRFHCHFSPRDWQRLINNNWGFRPKRLSFKLFNIQVKEVTQNEGTKTIANNLTSTIQVFTDSEYQLPYVLGSAHQGCLPPFPADVFMIPQYGYLTLNNGSQAVGRSSFYCLEYFPSQMLRTGNNSEFSYTFEDVPFHSSYAHSQSLDRLMNPLIDQYLYYLSRTQSTGGTQGTQQLLFSQAGPANMSAQAKNWLPGPCYRQQRVSTTLSQNNNSNFAWTGATKYHLNGRDSLVNPGVAMATHKDDEERFFPSSGVLMFGKQGAGRDNVDYSSVMLTSEEEIKTTNPVATEQYGVVADNLQQTNTGPIVGNVNSQGALPGMVWQNRDVYLQGPIWAKIPHTDGNFHPSPLMGGFGLKHPPPQILIKNTPVPADPPTTFSQAKLASFITQYSTGQVSVEIEWELQKENSKRWNPEIQYTSNYYKSTNVDFAVNTEGTYSEPRPIGTRYLTRNL

SEQ ID NO: 267 - DNA, 2217 bp, synthetic construct
  misc_feature 1..2217: note = source = /note="Description of Artificial Sequence: Synthetic polynucleotide"
  source 1..2217: mol_type = other DNA
atggctgctgacggttatcttccagattggctcgaggacaacctctctgagggcattcgcgagtggtgggacctgaaacctggagcccccaagcccaaggccaaccagcagaagcaggacgacggccggggtctggtgcttcctggctacaagtacctcggacccttcaacggactcgacaagggggagcccgtcaacgcggcggacgcagcggccctcgagcacgacaaggcctacgaccagcagctcaaagcgggtgacaatccgtacctgcggtataaccacgccgacgccgagtttcaggagcgtctgcaagaagatacgtcttttgggggcaacctcgggcgagcagtcttccaggccaagaagcgggttctcgaacctctcggtctggttgaggaagctgctaagacggctcctggaaagaagagaccggtagaaccgtcacctcagcgttcccccgactcctccacgggcatcggcaagaaaggccagcagcccgctaaaaagagactgagctttggtcagactggcgactcagagtcagtccccgaccctcaaccaatcggagaaccaccagcaggcccctctggtctgggatctggtacaatggctgcaggcggtggcgctccaatggcagacaataacgaaggcgccgacggagtgggtagttcctcaggaaattggcattgcgattccacatggctgggcgacagagtcatcaccaccagcacccgaacctgggccctgcccacctacaacaaccacctctacaagcaaatatccaatgggacatcgggaggaagcaccaacgacaacacctacttcggctacagcaccccctgggggtattttgacttcaacagattccactgccacttctcaccacgtgactggcagcgactcatcaacaacaactggggattccggccaaaaagactcagcttcaagctcttcaacatccaggtcaaggaggtcacgcagaatgaaggcaccaagaccatcgccaataaccttaccagcacgattcaggtatttacggactcggaataccagctgccgtacgtcctcggctccgcgcaccagggctgcctgcctccgttcccggcggacgtcttcatgattccccagtacggctaccttacactgaacaatggaagtcaagccgtaggccgttcctccttctactgcctggaatattttccatctcaaatgctgcgaactggaaacaattctgaattcagctacaccttcgaggacgtgcctttccacagcagctacgcacacagccagagcttggaccgactgatgaatcctctcatcgaccagtacctgtactacttatccagaactcagtccacaggaggaactcaaggtacccagcaattgttattttctcaagctgggcctgcaaacatgtcggctcaggctaagaactggctacctggaccttgctaccggcagcagcgagtctctacgacactgtcgcaaaacaacaacagcaactttgcttggactggtgccaccaaatatcacctgaacggaagagactctttggtaaatcccggtgtcgccatggcaacccacaaggacgacgaggaacgcttcttcccgtcgagtggagtcctgatgtttggaaaacagggtgctggaagagacaatgtggactacagcagcgttatgctaaccagcgaagaagaaattaaaaccactaaccctgtagccacagaacaatacggtgtggtggctgacaacttgcagcaaaccaatacagggcctattgtgggaaatgtcaacagccaaggagccttacctggcatggtctggcagaaccgagacgtgtacctgcagggtcccatctgggccaagattcctcacacggacggcaacttccacccttcaccgctaatgggaggatttggactgaagcacccacctcctcagatcctgatcaagaacacgccggtacctgcggatcctccaacaacgttcagccaggcgaaattggcttccttcattacgcagtacagcaccggacaggtcagcgtggaaatcgagtgggagctgcagaaggagaacagcaaacgctggaacccagagattcagtacacttcaaactactacaaatctacaaatgtggactttgctgtcaatacagagggaacttattctgagcctcgccccattggtactcgttacctcacccgtaatctgtaa

SEQ ID NO: 268 - protein, 738 aa, synthetic construct
  REGION 1..738: note = source = /note="Description of Artificial Sequence: Synthetic polypeptide"
MAADGYLPDWLEDNLSEGIREWWDLKPGAPKPKANQQKQDDGRGLVLPGYKYLGPFNGLDKGEPVNAADAAALEHDKAYDQQLKAGDNPYLRYNHADAEFQERLQEDTSFGGNLGRAVFQAKKRVLEPLGPVEEAAKTAPGKKRPVEPPPQRSPDSSTGIGKKGQQPAKKRLNFGQTGDSESVPDPQPIGEPPAGPSGLGSGTMAAGGGAPMADNNEGADGVGSSSGNWHCDSTWLGDRVITTSTRTWALPTYNNHLYKQISNGTSGGSTNDNTYFGYSTPWGYFDFNRFHCHFSPRDWQRLINNNWGFRPKRLSFKLFNIQVKEVTQNEGTKTVANNLTSTIQVFTDSEYQLPYVLGSAHQGCLPPFPADVFMIPQYGYLTLNNGSQAVGRSSFYCLEYFPSQMLRTGNNFEFSYTFEDVPFHSSYAHSQSLDRLMNPLIDQYLYYLSRTQSTGGTQGTQQLLFSQAGPANMSAQAKNWLPGPCYRQQRVSTTLSQNNNSNFAWTGATKYHLNGRDSLVNPGVAMATHKDDEERFFPSSGVLMFGKQGAGRDNVDYSSVMLTSEEEIKTTNPVATEQYGVVADNLQQTNTGPIVGNVNSQGALPGMVWQNRDVYLQGPIWAKIPHTDGNFHPSPLMGGFGLKHPPPQILIKNTPVPADPPTTFSQAKLASFITQYSTGQVSVEIEWELQKENSKRWNPEIQYTSNYYKSTNVDFAVNTEGTYSEPRPIGTRYLTRNL

SEQ ID NO: 269 - DNA, 2217 bp, synthetic construct
  misc_feature 1..2217: note = source = /note="Description of Artificial Sequence: Synthetic polynucleotide"
  source 1..2217: mol_type = other DNA
atggctgctgacggttatcttccagattggctcgaggacaacctctctgagggcattcgcgagtggtgggacctgaaacctggagcccccaagcccaaggccaaccagcagaagcaggacgacggccggggtctggtgcttcctggctacaagtacctcggacccttcaacggactcgacaagggggagcccgtcaacgcggcggacgcagcggccctcgagcacgacaaggcctacgaccagcagctcaaagcgggtgacaatccgtacctgcggtataaccacgccgacgccgagtttcaggagcgtctacaagaagatacgtcttttgggggcaacctcgggcgagcagtcttccaggccaagaagcgggttctcgaacctctcggtccggttgaggaagctgctaagacggctcctggaaagaagagaccggtagaaccgccacctcagcgttcccccgactcctccacgggcatcggcaagaaaggccagcagcccgctaaaaagagactgaactttggtcagactggcgactcagagtcagtccccgaccctcaaccaatcggagaaccaccagcaggcccctctggtctgggatctggtacaatggctgcaggcggtggcgctccaatggcagacaataacgaaggcgccgacggagtgggtagttcctcaggaaattggcattgcgattccacatggctgggcgacagagtcatcaccaccagcacccgaacctgggccctgcccacctacaacaaccacctctacaagcaaatatccaatgggacatcgggaggaagcaccaacgacaacacctacttcggctacagcaccccctgggggtattttgacttcaacagattccactgccacttctcaccacgtgactggcagcgactcatcaacaacaactggggattccggccaaaaagactcagcttcaagctcttcaacatccaggtcaaggaggtcacgcagaatgaaggcaccaagaccgtcgccaataaccttaccagcacgattcaggtatttacggactcggaataccagctgccgtacgtcctcggctccgcgcaccagggctgcctgcctccgttcccggcggacgtcttcatgattccccagtacggctaccttacactgaacaatggaagtcaagccgtaggccgttcctccttctactgcctggaatattttccatctcaaatgctgcgaactggaaacaattttgaattcagctacaccttcgaggacgtgcctttccacagcagctacgcacacagccagagcttggaccgactgatgaatcctctcatcgaccagtacctgtactacttatccagaactcagtccacaggaggaactcaaggtacccagcaattgttattttctcaagctgggcctgcaaacatgtcggctcaggctaagaactggctacctggaccttgctaccggcagcagcgagtctctacgacactgtcgcaaaacaacaacagcaactttgcttggactggtgccaccaaatatcacctgaacggaagagactctttggtaaatcccggtgtcgccatggcaacccacaaggacgacgaggaacgcttcttcccgtcgagtggagtcctgatgtttggaaaacagggtgctggaagagacaatgtggactacagcagcgttatgctaaccagcgaagaagaaattaaaaccactaaccctgtagccacagaacaatacggtgtggtggctgacaacttgcagcaaaccaatacagggcctattgtgggaaatgtcaacagccaaggagccttacctggcatggtctggcagaaccgagacgtgtacctgcagggtcccatctgggccaagattcctcacacggacggcaacttccacccttcaccgctaatgggaggatttggactgaagcacccacctcctcagatcctgatcaagaacacgccggtacctgcggatcctccaacaacgttcagccaggcgaaattggcttccttcattacgcagtacagcaccggacaggtcagcgtggaaatcgagtgggagctgcagaaggagaacagcaaacgttggaacccagagattcagtacacttcaaactactacaaatctacaaatgtggactttgctgtcaatacagagggaacttattctgagcctcgccccattggtactcgttacctcacccgtaatctgtaa

SEQ ID NO: 270 - protein, 738 aa, synthetic construct
  REGION 1..738: note = source = /note="Description of Artificial Sequence: Synthetic polypeptide"
MAADGYLPDWLEDNLSEGIREWWDLKPGAPKPKANQQKQDDGRGLVLPGYKYLGPFNGLDKGEPVNAADAAALEHDKAYDQQLKAGDNPYLRYNHADAEFQERLQEDTSFGGNLGRAVFQAKKRVLEPLGLVEEAAKTAPGKKRPVEPSPQRSPDSSTGIGKKGQQPAKKRLNFGQTGDSESVPDPQPIGEPPAGPSGLGSGTMAAGGGAPMADNNEGADGVGSSSGNWHCDSTWLGDRVITTSTRTWALPTYNNHLYKQISNGTSGGSTNDNTYFGYSTPWGYFDFNRFHCHFSPRDWQRLINNNWGFRPKRLSFKLFNIQVKEVTQNEGTKTIANNLTSTIQVFTDSEYQLPYVLGSAHQGCLPPFPADVFMIPQYGYLTLNNGSQAVGRSSFYCLEYFPSQMLRTGNNFEFSYTFEDVPFHSSYAHSQSLDRLMNPLIDQYLYYLSRTQSTGGTQGTQQLLFSQAGPANMSAQAKNWLPGPCYRQQRVSTTLSQSNNSNFAWTGATKYHLNGRDSLVNPGVAMATHKDDEERFFPSSGVLMFGKQGAGRDNVDYSSVMLTSEEEIKTTNPVATEQYGVVADNLQQTNTGPIVGNVNSQGALPGMVWQNRDVYLQGPIWAKIPHTDGNFHPSPLMGGLGLKHPPPQILIKNTPVPADPPTTFSQAKLASFITQYSTGQVSVEIEWELQKENSKRWNPEIQYTSNYYKSTNVDFAVNTEGTYSEPRPIGTRYLTRNL

SEQ ID NO: 271 - DNA, 2217 bp, synthetic construct
  misc_feature 1..2217: note = source = /note="Description of Artificial Sequence: Synthetic polynucleotide"
  source 1..2217: mol_type = other DNA
atggctgctgacggttatcttccagattggctcgaggacaacctctctgagggcattcgcgagtggtgggacctgaaacctggagcccccaagcccaaggccaaccagcagaagcaggacgacggccggggtctggtgcttcctggctacaagtacctcggacccttcaacggactcgacaagggggagcccgtcaacgcggcggacgcagcggccctcgagcacgacaaggcctacgaccagcagctcaaagcgggtgacaatccgtacctgcggtataaccacgccgacgccgagtttcaggagcgtctgcaagaagatacgtcttttgggggcaacctcgggcgagcagtcttccaggccaagaagcgggttctcgaacctctcggtctggttgaggaagcggctaagacggctcctggaaagaagagaccggtagaaccgtcacctcagcgttcccccgactcctccacgggcatcggcaagaaaggccagcagcccgctaaaaagagactgaactttggtcagactggcgactcagagtcagtccccgaccctcaaccaatcggagaaccaccagcaggcccctctggtctgggatctggtacaatggctgcaggcggtggcgctccaatggcagacaataacgaaggcgccgacggagtgggtagttcctcaggaaattggcattgcgattccacatggctgggcgacagagtcatcaccaccagcacccgaacctgggccctgcccacctacaacaaccacctctacaagcaaatatccaatgggacatcgggaggaagcaccaacgacaacacctacttcggctacagcaccccctgggggtattttgacttcaacagattccactgccacttctcaccacgtgactggcagcgactcatcaacaacaactggggattccggccaaaaagactcagcttcaagctcttcaacatccaggtcaaggaggtcacgcagaatgaaggcaccaagaccatcgccaataaccttaccagcacgattcaggtatttacggactcggaataccagctgccgtacgtcctcggctccgcgcaccagggctgcctgcctccgttcccggcggacgtcttcatgattccccagtacggctaccttacactgaacaatggaagtcaagccgtaggccgttcctccttctactgcctggaatattttccatctcaaatgctgcgaactggaaacaattttgaattcagctacaccttcgaggacgtgcctttccacagcagctacgcacacagccagagcttggaccgactgatgaatcctctcatcgaccagtacctgtactacttatccagaactcagtccacaggaggaactcaaggtacccagcaattgttattttctcaagctgggcctgcaaacatgtcggctcaggctaagaactggctacctggaccttgctaccggcagcagcgagtctctacgacactgtcgcaaagcaacaacagcaactttgcttggactggtgccaccaaatatcacctgaacggaagagactctttggtaaatcccggtgtcgccatggcaacccacaaggacgacgaggaacgcttcttcccgtcgagtggagtcctgatgtttggaaaacagggtgctggaagagacaatgtggactacagcagcgttatgctaaccagcgaagaagaaattaaaaccactaaccctgtagccacagaacaatacggtgtggtggctgacaacttgcagcaaaccaatacagggcctattgtgggaaatgtcaacagccaaggagccttacctggcatggtctggcagaaccgagacgtgtacctgcagggtcccatctgggccaagattcctcacacggacggcaacttccacccttcaccgctaatgggaggacttggactgaagcacccacctcctcagatcctgatcaagaacacgccggtacctgcggatcctccaacaacgttcagccaggcgaaattggcttccttcattacgcagtacagcaccggacaggtcagcgtggaaatcgagtgggagctgcagaaggagaacagcaaacgctggaacccagagattcagtacacttcaaactactacaaatctacaaatgtggactttgctgtcaatacagagggaacttattctgagcctcgccccattggtactcgttacctcacccgtaatctgtaa

SEQ ID NO: 272 - protein, 737 aa, synthetic construct
  REGION 1..737: note = source = /note="Description of Artificial Sequence: Synthetic polypeptide"
MAADGYLPDWLEDNLSEGIREWWDLKPGAPKPKANQQKQDDGRGLVLPGYKYLGPFNGLDKGEPVNAADAAALEHDKAYDQQLKAGDNPYPRYNHADAEFQERLQEDTPFGGNLGRAVFQAKKRVLEPLGLVEEAAKTAPGKKRPVEPSPQRSPDSSTGIGKKGQQPAKKRLNFGQTGDSESVPDPQPIGEPPAGPSGLGSGTMAAGGGAPMADNNEGADGVGNASGNWHCDSTWLGDRVITTSTRTWALPTYNNHLYKQISSASTGASNDNHYFGYSTPWGYFDFNRFHCHFSPRDWQRLINNNWGFRPKRLNFKLFNIQVKEVTTNDGVTTIANNLTSTVQVFSDSEYQLPYVLGSAHQGCLPPFPADVFMIPQYGYLTLNNGSQAVGRSSFYCLEYFPSQMLRTGNNFTFSYTFEEVPLHSSYAHSQSLDRLMNPLIVQYLYYLNRTQNQSGSAQNKDLLFSRGSPAGMSVQPKNWLPGPCYRQQRVSKTKTDNNNSNFTWTGASKYNLNGRESIINPGTAMASHKDDEDKFFPMSGVMIFGKESAGASNTALDNVMITDEEEIKATNPVATERFGTVAVNFQSSSTDPATGDVHAMGALPGMVWQDRDVYLQGPIWAKIPHTDGHFHPSPLMGGFGLKNPPPQILIKNTPVPANPPAEFSATKFASFITQYSTGQVSVEIEWELQKENSKRWNPEVQYTSNYAKSASVDFTVDNNGLYTEPRPIGTRYLTRPL

SEQ ID NO: 273 - protein, 737 aa, synthetic construct
  REGION 1..737: note = source = /note="Description of Artificial Sequence: Synthetic polypeptide"
MAADGYLPDWLEDNLSEGIREWWDLKPGAPKPKANQQKQDDGRGLVLPGYKYLGPFNGLDKGEPVNAADAAALEHDKAYDQQLKAGDNPYPRYNHADAEFQERLQEDTSFGGNLGRAVFQAKKRVLEPLGLVEEAAKTAPGKKRPVEPSPQRSPDSSTGIGKKGQQPAKKRLNFGQTGDSESVPDPQPIGEPPAGPSGLGSGTMAAGGGAPMADNNEGADGVGNASGNWHCDSTWLGDRVITTSTRTWALPTYNNHLYKQISSASTGASNDNHYFGYSTPWGYFDFNRFHCHFSPRDWQRLINNNWGFRPKRLNFKLFNIQVKEVTTNDGVTTIANNLTSTVQVFSDSEYQLPYVLGSAHQGCLPPFPADVFMIPQYGYLTLNNGSQAVGRSSFYCLEYFPSQMLRTGNNFTFSYTFEEVPLHSSYAHSQSLDRLMNPLIDQYLYYLNRTQNQSGSAQNKDLLFSRGSPAGMSVQPKNWLPGPCYRQQRVSKTKTDNNNSNFTWTGASKYNLNGRESIINPGTAMASHKDDEDKFFPMSGVMIFGKESAGASNTALDNVMITDEEEIKATNPVATERFGTVAVNFQSSSTDPATGDVHAMGALPGMVWQDRDVYLQGPIWAKIPHTDGHFHPSPLMGGFGLKNPPPQILIKNTPVPANPPAEFSATKFASFITQYSTGQVSVEIEWELQKENSKRWNPEVQYTSNYAKSASVDFTVDNNGLYTEPRPIGTRYLTRPL

SEQ ID NO: 274 - DNA, 2214 bp, synthetic construct
  misc_feature 1..2214: note = source = /note="Description of Artificial Sequence: Synthetic polynucleotide"
  source 1..2214: mol_type = other DNA
atggctgctgacggttatcttccagattggctcgaggacaacctctctgagggcattcgcgagtggtgggacctgaaacctggagcccccaagcccaaggccaaccagcagaagcaggacgacggccggggtctggtgcttcctggctacaagtacctcggacccttcaacggactcgacaagggggagcccgtcaacgcggcggacgcagcggccctcgagcacgacaaggcctacgaccagcagctcaaagcgggtgacaatccgtacccgcggtataaccacgccgacgccgagtttcaggagcgtctgcaagaagatacgccttttgggggcaacctcgggcgagcagtcttccaggccaagaagcgggttctcgaacctctcggtctggttgaggaagctgctaagacggctcctggaaagaagagaccggtagaaccgtcacctcagcgttcccccgactcctccacgggcatcggcaagaaaggccagcagcccgctaaaaagagactgaactttggtcagactggcgactcagagtcagtccccgaccctcaaccaatcggagaaccaccagcaggcccctctggtctgggatctggtacaatggctgcaggcggtggcgctccaatggcagacaataacgaaggcgccgacggagtgggtaatgcctcaggaaattggcattgcgattccacatggctgggcgacagagtcatcaccaccagcacccgcacctgggccttgcccacctacaataaccacctctacaagcaaatctccagtgcttcaacgggggccagcaacgacaaccactacttcggctacagcaccccctgggggtattttgatttcaacagattccactgccacttttcaccacgtgactggcagcgactcatcaacaacaattggggattccggcccaagagactcaacttcaaactcttcaacatccaagtcaaggaggtcacgacgaatgatggcgtcacaaccatcgctaataaccttaccagcacggttcaagtcttctcggactcggagtaccagcttccgtacgtcctcggctctgcgcaccagggctgcctccctccgttcccggcggacgtgttcatgattccgcaatacggctacctgacgctcaacaatggcagccaagccgtgggacgttcatccttttactgcctggaatatttcccttctcagatgctgagaacgggcaacaactttaccttcagctacacctttgaggaagtgcctctccacagcagctacgcgcacagccagagcctggaccggctgatgaatcctctcatcgtccaatacctgtattacctgaacagaactcaaaatcagtccggaagtgcccaaaacaaggacttgctgttcagccgtgggtctccagctggcatgtctgttcagcccaaaaactggctacctggaccctgttatcggcagcagcgcgtttctaaaacaaaaacagacaacaacaacagcaattttacctggactggtgcttcaaaatataacctcaatgggcgtgaatccatcatcaaccctggcactgctatggcctcacacaaagacgacgaagacaagttctttcccatgagcggtgtcatgatttttggaaaagagagcgccggagcttcaaacactgcattggacaatgtcatgattacagacgaagaggaaattaaagccactaaccctgtggccaccgaaagatttgggaccgtggcagtcaatttccagagcagcagcacagaccctgcgaccggagatgtgcatgctatgggagcattacctggcatggtgtggcaagatagagacgtgtacctgcagggtcccatttgggccaaaattcctcacacagatggacactttcacccgtctcctcttatgggcggctttggactcaagaacccgcctcctcagatcctcatcaaaaacacgcctgttcctgcgaatcctccggcggagttttcagctacaaagtttgcttcattcatcacccaatactccacaggacaagtgagtgtggaaattgaatgggagctgcagaaagaaaacagcaagcgctggaatcccgaagtgcagtacacatccaattatgcaaaatctgccagcgttgattttactgtggacaacaatggactttatactgagcctcgccccattggcacccgttaccttacccgtcccctgtaa

SEQ ID NO: 275 - protein, 736 aa, synthetic construct
  REGION 1..736: note = source = /note="Description of Artificial Sequence: Synthetic polypeptide"
MAADGYLPDWLEDTLSEGIRQWWKLRPGPPPPKPAERHKDDSRGLVLPGYKYLGPFNGLDKGEPVNEADAAALEHDKAYDRQLDSGDNPYLKYNHADAEFQERLKEDTSFGGNLGRAVFQAKKRVLEPLGLVEEGAETAPGKKRPVEQSPQGPDSSSGIGKTGQQPAKKRLNFGQTGDSESVPDPQPLGEPPATPAAVGPTTMASGGGAPMADNNEGADGVGNASGNWHCDSTWLGDRVITTSTRTWALPTYNNHLYKQISSASTGASNDNHYFGYSTPWGYFDFNRFHCHFSPRDWQRLINNNWGFRPKRLNFKLFNIQVKEVTTNDGVTTIANNLTSTVQVFSDSEYQLPYVLGSAHQGCLPPFPADVFMIPQYGYLTLNNGSQAVGRSSFYCLEYFPSQMLRTGNNFTFSYTFEEVPFHSSYAHSQSLDRLMNPLIDQYLYYPNRTQNQSGSAQNKDLLFSRGSPAGMSVQPKNWLPGPCYRQQRVSKTKTDNNNSNFTWTGASKYNLNGRESIINPGTAMASHKDDEDKFFPMSGVMIFGKESAGASNTALDNVMITDEEEIKATNPVATERFGTVAVNFQSSSTDPATGDVHAMGALPGMVWQGRDVYLQGPIWAKIPHTDGHFHPSPLMGGFGLKNPPPQILIKNTPVPANPPAEFSATKFASFITQYSTGQVSVEIEWELQKENSKRWNPEVQYTSNYAKSANVDFTVDNNGLYTEPRPIGTRYLTRPL

SEQ ID NO: 276 - DNA, 2211 bp, synthetic construct
  misc_feature 1..2211: note = source = /note="Description of Artificial Sequence: Synthetic polynucleotide"
  source 1..2211: mol_type = other DNA
atggctgccgatggttatcttccagattggctcgaggacactctctctgaaggaataagacagtggtggaagctcagacctggcccaccaccaccaaagcccgcagagcggcataaggacgacagcaggggtcttgtgcttcctgggtacaagtacctcggacccttcaacggactcgacaagggagagccggtcaacgaggcagacgccgcggccctcgagcacgacaaagcctacgaccggcagctcgacagcggagacaacccgtacctcaagtacaaccacgccgacgcggagtttcaggagcgccttaaagaagatacgtcttttgggggcaacctcgggcgagcagtcttccaggccaagaagcgggttctcgaacctctcggtctggttgaggaaggcgctgagacggctcctggaaagaaacgtccggtagagcagtcgccacaagggccagactcctcctcgggcatcggcaagacaggccagcagcccgctaaaaagagactcaattttggtcagactggcgactcagagtcagtccccgatccacaacctctcggagaacctccagcaacccccgctgctgtgggacctactacaatggcttcaggcggtggcgcaccaatggcagacaataacgaaggcgccgacggagtgggtaatgcctcaggaaattggcattgcgattccacatggctgggcgacagagtcatcaccaccagcacccgcacctgggccttgcccacctacaataaccacctctacaagcaaatctccagtgcttcaacgggggccagcaacgacaaccactacttcggctacagcaccccctgggggtattttgatttcaacagattccactgccacttttcaccacgtgactggcagcgactcatcaacaacaattggggattccggcccaagagactcaacttcaaactcttcaacatccaagtcaaggaggtcacgacgaatgatggcgtcacaaccatcgctaataaccttaccagcacggttcaagtcttctcggactcggagtaccagcttccgtacgtcctcggctctgcgcaccagggctgcctccctccgttcccggcggacgtgttcatgattccgcaatacggctacctgacgctcaacaatggcagccaagccgtgggacgttcatccttttactgcctggaatatttcccttctcagatgctgagaacgggcaacaactttaccttcagctacacctttgaggaagtgcctttccacagcagctacgcgcacagccagagcctggaccggctgatgaatcctctcatcgaccaatacctgtattacccgaacagaactcaaaatcagtccggaagtgcccaaaacaaggacttgctgtttagccgtgggtctccagctggcatgtctgttcagcccaaaaactggctacctggaccctgttatcggcagcagcgcgtttctaaaacaaaaacagacaacaacaacagcaattttacctggactggtgcttcaaaatataacctcaatgggcgtgaatccatcatcaaccctggcactgctatggcctcacacaaagacgacgaagacaagttctttcccatgagcggtgtcatgatttttggaaaagagagcgccggagcttcaaacactgcattggacaatgtcatgattacagacgaagaggaaattaaagccactaaccctgtggccaccgaaagatttgggaccgtggcagtcaatttccagagcagcagcacagaccctgcgaccggagatgtgcatgctatgggagcattacctggcatggtgtggcaaggtagagacgtgtacctgcagggtcccatttgggccaaaattcctcacacagatggacactttcacccgtctcctcttatgggcggctttggactcaagaacccgcctcctcagatcctcatcaaaaacacgcctgttcctgcgaatcctccggcggagttttcagctacaaagtttgcttcattcatcacccaatactccacaggacaagtgagtgtggaaattgaatgggagctgcagaaagaaaacagcaagcgctggaatcccgaagtgcagtacacatccaattatgcaaaatctgccaacgttgattttactgtggacaacaatggactttatactgagcctcgccccattggcacccgttaccttacccgtcccctgtaa

SEQ ID NO: 277 - protein, 736 aa, synthetic construct
  REGION 1..736: note = source = /note="Description of Artificial Sequence: Synthetic polypeptide"
MAADGYLPDWLEDTLSEGIRQWWKLRPGPPPPKPAERHKDDSRGLVLPGYKYLGPFNGLDKGEPVNEADAAALEHDKAYDRQLDSGDNPYLKYNHADAEFQERLKEDTSFGGNLGRAVFQAKKRVLEPLGLVEEGAKTAPGKKRPVEQSPQGPDSSSGIGKTGQQPAKKRLNFGQTGDSESVPDPQPLGEPPATPAAVGPTTMASGGGAPMADNNEGADGVGNASGNWHCDSTWLGDRVITTSTRTWALPTYNNHLYKQISSASTGASNDNHYFGYSTPWGYFDFNRFHCHFSPRDWQRLINNNWGFRPKRLNFKLFNIQVKEVTTNDGVTTIANNLTSTVQVFSDSEYQLPYVLGSAHQGCLPPFPADVFMIPQYGYLTLNNGSQAVGRSSFYCLEYFPSQMLRTGNNFTFSYTFEEVPFHSSYAHSQSLDRLMNPLIDQYLYYPNRTQNQSGSAQNKDLLFSRGSPAGMSVQPKNWLPGPCYRQQRVSKTKTDNNNSNFTWTGASKYNLNGRESIINPGTAMASHKDDEDKFFPMSGVMIFGKESAGASNTALDNVMITDEEEIKATNPVATERFGTVAVNFQSSSTDPATGDVHAMGALPGMVWQGRDVYLQGPIWAKIPHTDGHFHPSPLMGGFGLKNPPPQILIKNTPVPANPPAEFSATKFASFITQYSTGQVSVEIEWELQKENSKRWNPEVQYTSNYAKSANVDFTVDNNGLYTEPRPIGTRYLTRPL

SEQ ID NO: 278 - protein, 736 aa, synthetic construct
  REGION 1..736: note = source = /note="Description of Artificial Sequence: Synthetic polypeptide"
MAADGYLPDWLEDTLSEGIRQWWKLRPGPPPPKPAERHKDDSRGLVLPGYKYLGPFNGLDKGEPVNEADAAALEHDKAYDRQLDSGDNPYLKYNHADAEFQERLKEDTSFGGNLGRAVFQAKKRVLEPLGLVEEGAKTAPGKKRPVEQSPQGPDSSSGIGKTGQQPAKKRLNFGQTGDSESVPDPQPLGEPPATPAAVGPTTMASGGGAPMADNNEGADGVGNASGNWHCDSTWLGDRVITTSTRTWALPTYNNHLYKQISSASTGASNDNHYFGYSTPWGYFDFNRFHCHFSPRDWQRLINNNWGFRPKRLNFKLFNIQVKEVTTNDGVTTIANNLTSTVQVFSDSEYQLPYVLGSAHQGCLPPFPADVFMIPQYGYLTLNNGSQAVGRSSFYCLEYFPSQMLRTGNNFTFSYTFEEVPFHSSYAHSQSLDRLMNPLIDQYLYYLNRTQNQSGSAQNKDLLFSRGSPAGMSVQPKNWLPGPCYRQQRVSKTKTDNNNSNFTWTGASKYNLNGRESIINPGTAMASHKDDEDKFFPMSGVMIFGKESAGASNTALDNVMITDEEEIKATNPVATERFGTVAVNFQSSSTDPATGDVHAMGALPGMVWQGRDVYLQGPIWAKIPHTDGHFHPSPLMGGFGLKNPPPQILIKNTPVPANPPAEFSATKFASFITQYSTGQVSVEIEWELQKENSKRWNPEVQYTSNYAKSANVDFTVDNNGLYTEPRPIGTRYLTRPL

SEQ ID NO: 279 - protein, 736 aa, synthetic construct
  REGION 1..736: note = source = /note="Description of Artificial Sequence: Synthetic polypeptide"
MAADGYLPDWLEDTLSEGIRQWWKLRPGPPPPKPAERHKDDSRGLVLPGYKYLGPFNGLDKGEPVNEADAAALEHDKAYDRQLDSGDNPYLKYNHADAEFQERLKEDTSFGGNLGRAVFQAKKRVLEPLGLVEEGAKTAPGKKRPVEQSPQGPDSSSGIGKTGQQPAKKRLNFGQTGDSESVPDPQPLGEPPATPAAVGPTTMASGGGAPMADNNEGADGVGNASGNWHCDSTWLGDRVITTSTRTWALPTYNNHLYKQISSASTGASNDNHYFGYSTPWGYFDFNRFHCHFSPRDWQRLINNNWGFRPKRLNFKLFNIQVKEVTTNDGVTTIANNLTSTVQVFSDSEYQLPYVLGSAHQGCLPPFPADVFMIPQYGYLTLNNGSQAVGRSSFYCLEYFPSQMLRTGNNFTFSYTFEEVPFHSSYAHSQSLDRLMNPLIDQYLYYLNRTQNQSGSAQNKDLLFSRGSPAGMSVQPKNWLPGPCYRQQRVSKTKTDNNNSNFTWTGASKYNLNGRESIINPGTAMASHKDDEDKFFPMSGVMIFGKESAGASNTALDNVMITDEEEIKATNPVATERFGTVAVNFQSSSTDPATGDVHAMGALPGMVWQDRDVYLQGPIWAKIPHTDGHFHPSPLMGGFGLKNPPPQILIKNTPVPANPPAEFSATKFASFITQYSTGQVSVEIEWELQKENSKRWNPEVQYTSNYAKSANVDFTVDNNGLYTEPRPIGTRYLTRPL

SEQ ID NO: 280 - DNA, 2208 bp, synthetic construct
  misc_feature 1..2208: note = source = /note="Description of Artificial Sequence: Synthetic polynucleotide"
  source 1..2208: mol_type = other DNA
atggctgccgatggctatcttccagattggctcgaggacactctctctgaaggaataagacagtggtggaagctcaaacctggcccaccaccaccaaagcccgcagagcggcatagggacgacagcaggggtcttgtgcttcctgggtacaagtacctcggacccttcaacggactcgacaagggagagccggtcaacgaggcagacgccgcggccctcgagcacgacaaagcctacgaccggcagctcgacagcggagacaacccgtacctcaagtacaaccacgccgacgcggagtttcaggagcgccttaaagaagatacgtcttttgggggcaacctcggacgagcagtcttccaggcgaaaaagagggttcttgaacctctgggcctggttgaggaacctgttaagacggctccgggaaaaaagaggccggtagagcactctcctgtggagccagactcctcctcgggaaccggaaaggcgggccagcagcctgcaagaaaaagattgaattttggtcagactggagacgcagactcagtacctgacccccagcctctcggacagccaccagcagccccctctggtctgggaactaatacgatggctacaggcagtggcgcaccaatggcagacaataacgagggcgccgacggagtgggtaattcctcgggaaattggcattgcgattccacatggatgggcgacagagtcatcaccaccagcacccgaacctgggccctgcccacctacaacaaccacctctacaaacaaatttccagccaatcaggagcctcgaacgacaatcactactttggctacagcaccccttgggggtattttgacttcaacagattccactgccacttttcaccacgtgactggcaaagactcatcaacaacaactggggattccgacccaagagactcaacttcaagctctttaacattcaagtcaaagaggtcacgcagaatgacggtacgacgacgattgccaataaccttaccagcacggttcaggtgtttactgactcggggtaccagctcccgtacgtcctcggctcggcgcatcaaggatgcctcccgccgttcccagcagacgtcttcatggtgccacagtatggataccccaccctgaacaacgggagtcaggcagtaggacgctcttcattttactgcctggagtactttccttctcagatgctgcgtaccggaaacaactttaccttcagctacacttttgaggacgttcctttccacagcagctacgctcacagccagagtctggaccgtctcatgaatcctctcatcgaccagtacctgtattacttgagcacaacaaacactccaagtggaaccaccacgcagtcaaggcttcagttttctcaggccggagcgagtgacattcgggaccagtctaggaactggcttcctggaccctgttaccgccagcagcgagtatcaaagacatctgcggataacaacaacagtgaatactcgtggactggagctaccaagtaccacctcaatggcagagactctctggtgaatccgggcccggccgtggcaagccacaaggacgatgaagaaaagttttttcctcagagcggggttctcatctttgggaagcaaggctcagagaaaacaaatgtggacattgaaaaggtcatgattacagacgaagaggaaatcaggacaaccaatcccgtggctacggagcagtatggttctgtatctaccaacctccagagaggcaacagacaagcagctaccgcagatgtcaacacacaaggcgttcttccaggcatggtctggcaggacagagatgtgtaccttcaggggcccatctgggcaaagattccacacacggacggacattttcacccctctcccctcatgggtggattcggacttaaacaccctcctccacagattctcatcaagaacaccccggtacctgcgaatccttcgaccaccttcagtgcggcaaagtttgcttccttcatcacacagtactccacgggacaggtcagcgtggagatcgagtgggagctgcagaaggaaaacagcaaacgctggaatcccgaaattcagtacacttccaactacaacaagtctgttaatgtggactttactgtggacactaatggcgtgtattcagagcctcgccccattggcaccagatacctgactcgtaatctgtaa

SEQ ID NO: 281 - protein, 735 aa, synthetic construct
  REGION 1..735: note = source = /note="Description of Artificial Sequence: Synthetic polypeptide"
MAADGYLPDWLEDTLSEGIRQWWKLKPGPPPPKPAERHRDDSRGLVLPGYKYLGPFNGLDKGEPVNEADAAALEHDKAYDRQLDSGDNPYLKYNHADAEFQERLKEDTSFGGNLGRAVFQAKKRVLEPLGLVEEPVKTAPGKKRPVEHSPVEPDSSSGTGKAGQQPARKRLNFGQTGDADSVPDPQPLGQPPAAPSGLGTNTMATGSGAPMADNNEGADGVGNSSGNWHCDSTWMGDRVITTSTRTWALPTYNNHLYKQISSQSGASNDNHYFGYSTPWGYFDFNRFHCHFSPRDWQRLINNNWGFRPKRLNFKLFNIQVKEVTQNDGTTTIANNLTSTVQVFTDSGYQLPYVLGSAHQGCLPPFPADVFMVPQYGYPTLNNGSQAVGRSSFYCLEYFPSQMLRTGNNFTFSYTFEDVPFHSSYAHSQSLDRLMNPLIDQYLYYLSTTNTPSGTTTQSRLQFSQAGASDIRDQSRNWLPGPCYRQQRVSKTSADNNNSEYSWTGATKYHLNGRDSLVNPGPAVASHKDDEEKFFPQSGVLIFGKQGSEKTNVDIEKVMITDEEEIRTTNPVATEQYGSVSTNLQRGNRQAATADVNTQGVLPGMVWQDRDVYLQGPIWAKIPHTDGHFHPSPLMGGFGLKHPPPQILIKNTPVPANPSTTFSAAKFASFITQYSTGQVSVEIEWELQKENSKRWNPEIQYTSNYNKSVNVDFTVDTNGVYSEPRPIGTRYLTRNL

SEQ ID NO: 282 - DNA, 2211 bp, synthetic construct
  misc_feature 1..2211: note = source = /note="Description of Artificial Sequence: Synthetic polynucleotide"
  source 1..2211: mol_type = other DNA
atggctgccgacggttatcttccagattggctcgaggacactctctctgaaggaataagacagtggtggaagctcaaacctggcccaccaccaccaaagcccgcagagcggcataaggacgacagcaggggtcttgtgcttcctgggtacaagtacctcggacccttcaacggactcgacaagggagagccggtcaacgaggcagacgccgcggccctcgagcacgacaaagcctacgaccggcagctcgacagcggagacaacccgtacctcaagtacaaccacgccgacgcggagtttcaggagcgccttaaagaagatacgtcttttgggggcaacctcgggcgggcagtcttccaggccaagaagcgggttctcgaacctctcggtctggttgaggaaggcgctaagacggctcctggaaagaaacgtccggtagagcagtcgccacaagagccagactccccctcgggcatcggcaagacaggccagcagcccgctaaaaagagactcaattttggtcagactggcgactcagagtcagtccccgatccacaacctctcggagaacctccagcaacccccgctgctgtgggacctactacaatggcttcaggcggtggcgcaccaatggcagacaataacgaaggcgccgacggagtgggtaatgcctcaggaaattggcactgcgattccacatggctgggcgacagagtcatcaccaccagcacccgcacctgggccttgcccacctacaataaccacctctacaagcaaatctccagtgcttcaacgggggccagcaacgacaaccactacttcggctacagcaccccctgggggtattttgatttcaacagattccactgccacttttcaccacgtgactggcagcgactcatcaacaacaattggggattccggcccaagagactcaacttcaaactcttcaacatccaagtcaaggaggtcacgacgaatgatggcgtcacaaccatcgctaataaccttaccagcacggttcaagtcttctcggactcggagtaccagcttccgtacgtcctcggctctgcgcaccagggccgcctccctccgttcccggcggacgtgttcatgattccgcaatacggctacctgacgctcaacaatggcagccaagccgtgggacgttcatcctcttactgcctggaatatttcccttctcagatgctgagaacgggcaacaactttaccttcagctacacctttgaggaagtgcctctccacagcagctgcgcgcacagccagagcctggaccggctgatgaatcctctcatcgaccaatacctgtattacctgaacagaactcaaaatcagtccggaagtgcccaaaacagggacttgctgttcagccgtgggtctccagctggcatgtctgttcagcccaaaaactggctacctggaccctgttatcggcagcagcgcgtttctaaaacaaaaacagacaacaacaacagcaattttacctggactggtgcttcaaaatataacctcaatgggcgtgaatccatcatcaaccctggcactgctatggcctcacacaaagacgacgaagacaagttctttcccatgagcggtgtcatgatttttggaaaagagagcgccggagcttcaaacactgcattggacaatgtcatgattacagacgaagaggaaattaaagccactaaccctgtggccaccgaaagatttgggaccgtggcagtcaatttccagagcagcagcacagaccctgcgaccggagatgtgcatgctatgggagcattacctggcatggtgtggcaagatagagacgtgtacctgcagggtcccatttgggccaaaattcctcacacagatggacactttcacccgtctcctcttatgggcggctttggactcaagaacccgcctcctcagatcctcatcaaaaacacgcctgttcctgcgaatcctccggcggagttttcagctacaaagtttgcttcattcatcacccaatactccgcaggacaagtgagtgtggaaattgaatgggagctgcagaaagaaaacagcaagcgctggaatcccgaagtgcagtacacatccaattatgcaaaatctgccaacgttgattttactgtggacaacaatggactttatactgagcctcgccccattggcacccgttaccttacccgtcccctgtaa

SEQ ID NO: 283 - protein, 736 aa, synthetic construct
  REGION 1..736: note = source = /note="Description of Artificial Sequence: Synthetic polypeptide"
MAADGYLPDWLEDTLSEGIRQWWKLKPGPPPPKPAERHKDDSRGLVLPGYKYLGPFNGLDKGEPVNEADAAALEHDKAYDRQLDSGDNPYLKYNHADAEFQERLKEDTSFGGNLGRAVFQAKKRVLEPLGLVEEGAKTAPGKKRPVEQSPQEPDSPSGIGKTGQQPAKKRLNFGQTGDSESVPDPQPLGEPPATPAAVGPTTMASGGGAPMADNNEGADGVGNASGNWHCDSTWLGDRVITTSTRTWALPTYNNHLYKQISSASTGASNDNHYFGYSTPWGYFDFNRFHCHFSPRDWQRLINNNWGFRPKRLNFKLFNIQVKEVTTNDGVTTIANNLTSTVQVFSDSEYQLPYVLGSAHQGRLPPFPADVFMIPQYGYLTLNNGSQAVGRSSSYCLEYFPSQMLRTGNNFTFSYTFEEVPLHSSCAHSQSLDRLMNPLIDQYLYYLNRTQNQSGSAQNRDLLFSRGSPAGMSVQPKNWLPGPCYRQQRVSKTKTDNNNSNFTWTGASKYNLNGRESIINPGTAMASHKDDEDKFFPMSGVMIFGKESAGASNTALDNVMITDEEEIKATNPVATERFGTVAVNFQSSSTDPATGDVHAMGALPGMVWQDRDVYLQGPIWAKIPHTDGHFHPSPLMGGFGLKNPPPQILIKNTPVPANPPAEFSATKFASFITQYSAGQVSVEIEWELQKENSKRWNPEVQYTSNYAKSANVDFTVDNNGLYTEPRPIGTRYLTRPL

SEQ ID NO: 284 - protein, 736 aa, synthetic construct
  REGION 1..736: note = source = /note="Description of Artificial Sequence: Synthetic polypeptide"
MAADGYLPDWLEDTLSEGIRQWWKLKPGPPPPKPAERHKDDSRGLVLPGYKYLGPFNGLDKGEPVNEADAAALEHDKAYDRQLDSGDNPYLKYNHADAEFQERLKEDTSFGGNLGRAVFQAKKRVLEPLGLVEEGAKTAPGKKRPVEQSPQEPDSSSGIGKTGQQPAKKRLNFGQTGDSESVPDPQPLGEPPATPAAVGPTTMASGGGAPMADNNEGADGVGNASGNWHCDSTWLGDRVITTSTRTWALPTYNNHLYKQISSASTGASNDNHYFGYSTPWGYFDFNRFHCHFSPRDWQRLINNNWGFRPKRLNFKLFNIQVKEVTTNDGVTTIANNLTSTVQVFSDSEYQLPYVLGSAHQGCLPPFPADVFMIPQYGYLTLNNGSQAVGRSSFYCLEYFPSQMLRTGNNFTFSYTFEEVPLHSSCAHSQSLDRLMNPLIDQYLYYLNRTQNQSGSAQNRDLLFSRGSPAGMSVQPKNWLPGPCYRQQRVSKTKTDNNNSNFTWTGASKYNLNGRESIINPGTAMASHKDDEDKFFPMSGVMIFGKESAGASNTALDNVMITDEEEIKATNPVATERFGTVAVNFQSSSTDPATGDVHAMGALPGMVWQDRDVYLQGPIWAKIPHTDGHFHPSPLMGGFGLKNPPPQILIKNTPVPANPPAEFSATKFASFITQYSTGQVSVEIEWELQKENSKRWNPEVQYTSNYAKSANVDFTVDNNGLYTEPRPIGTRYLTRPL

SEQ ID NO: 285 - DNA, 2208 bp, synthetic construct
  misc_feature 1..2208: note = source = /note="Description of Artificial Sequence: Synthetic polynucleotide"
  source 1..2208: mol_type = other DNA
atggctgccgatggctatcttccagattggctcgaggacactctctctgaaggaataagacagtggtggaagctcaaacctggcccaccaccaccaaagcccgcagagcggcatagggacgacagcaggggtcttgtgcttcctgggtacaagtacctcggacccttcaacggactcgacaagggagagccggtcaacgaggcagacgccgcggccctcgagcacgacaaagcctacgaccggcagctcgacagcggagacaacccgtacctcaagtacaaccacgccgacgcggagtttcaggagcgccttaaagaagatacgtcttttgggggcaacctcggacgagcagtcttccaggcgaaaaagagggttcttgaacctctgggcctggttggggaacctgttaagacggctccgggaaaaaagaggccggtagagcactctcctgtggagccagactcctcctcgggaaccggaaaggcgggccagcagcctgcaagaaaaagattgaattttggtcagactggagacgcagactcagtacctgacccccagcctctcggacagccaccagcagccccctctggtctgggaactaatacgatggctacaggcagtggcgcaccaatggcagacaataacgagggcgccgacggagtgggtaattcctcgggaaattggcattgcgattccacatggatgggcgacagagtcatcaccaccagcacccgaacctgggccctgcccacctacaacaaccacctctacaaacaaatttccagccaatcaggagcctcgaacgacagtcactactttggctacagcaccccttgggggtattttgacttcaacagattccactgccacttttcaccacgtgactggcaaagactcatcaacaacaactggggattccgacccaagagactcaacttcaagctctttaacattcaagtcaaagaggtcacgcagaatgacggtacgacgacgattgccaataaccttaccagcacggttcaggtgtttactgactcggagtaccagctcccgtacgtcctcggctcggcgcatcaaggatgcctcccgccgttcccagcagacgtcttcatggtgccacagtatggatacctcaccctgaacaacgggagtcaggcagtaggacgctcttcattttactgcctggagtactttccttctcagatgctgcgtaccggaaacaactttaccttcagctacacttttgaggacgttcctttccacagcagctacgctcacagccagagtctggaccgtctcatgaatcctctcatcgaccagtacctgtattacttgagcacaacaaacactccaagtggaaccaccacgcagtcaaggctccagttttctcaggccggagcgagtgacattcgggaccagtctaggaactggcttcctggaccctgttaccgccagcagcgagtatcaaagacatctgcggataacaacaacagtgaatactcgtggactggagctaccaagtaccacctcaatggcagagactctctggtgaatccgggcccggccatggcaagccacaaggacaatgaagaaaagttttttcctcagagcggggttctcatctttgggaagcaaggctcagagaaaacaaatgtggacattgaaaaggtcatgattacagacgaagaggaaatcaggacaaccaatcccgtggctacggagcagtatggttctgtatctaccaacctccagagaggcaacagacaagcagctaccgcagatgtcaacacacaaggcgttcttccaggcatggtctggcaggacagagatgtgtaccttcaggggcccatctgggcaaagattccacacacggacggacattttcacccctctcccctcatgggtggattcggacttaaacaccctcctccacagattctcatcaagaacaccccggtacctgcgaatccttcgaccaccttcagtgcggcaaagtttgcttccttcatcacacagtactccacgggacaggtcagcgtggagatcgagtgggagctgcagaaggaaaacagcaaacgctggaatcccgaaattcagtacacttccaactacaacaagtctgttaatgtggactttactgtggacactaatggcgtgtattcagagcctcgccccattggcaccagatacctgactcgtaatctgtaa

SEQ ID NO: 286 - protein, 735 aa, synthetic construct
  REGION 1..735: note = source = /note="Description of Artificial Sequence: Synthetic polypeptide"
MAADGYLPDWLEDTLSEGIRQWWKLKPGPPPPKPAERHRDDSRGLVLPGYKYLGPFNGLDKGEPVNEADAAALEHDKAYDRQLDSGDNPYLKYNHADAEFQERLKEDTSFGGNLGRAVFQAKKRVLEPLGLVGEPVKTAPGKKRPVEHSPVEPDSSSGTGKAGQQPARKRLNFGQTGDADSVPDPQPLGQPPAAPSGLGTNTMATGSGAPMADNNEGADGVGNSSGNWHCDSTWMGDRVITTSTRTWALPTYNNHLYKQISSQSGASNDSHYFGYSTPWGYFDFNRFHCHFSPRDWQRLINNNWGFRPKRLNFKLFNIQVKEVTQNDGTTTIANNLTSTVQVFTDSEYQLPYVLGSAHQGCLPPFPADVFMVPQYGYLTLNNGSQAVGRSSFYCLEYFPSQMLRTGNNFTFSYTFEDVPFHSSYAHSQSLDRLMNPLIDQYLYYLSTTNTPSGTTTQSRLQFSQAGASDIRDQSRNWLPGPCYRQQRVSKTSADNNNSEYSWTGATKYHLNGRDSLVNPGPAMASHKDNEEKFFPQSGVLIFGKQGSEKTNVDIEKVMITDEEEIRTTNPVATEQYGSVSTNLQRGNRQAATADVNTQGVLPGMVWQDRDVYLQGPIWAKIPHTDGHFHPSPLMGGFGLKHPPPQILIKNTPVPANPSTTFSAAKFASFITQYSTGQVSVEIEWELQKENSKRWNPEIQYTSNYNKSVNVDFTVDTNGVYSEPRPIGTRYLTRNL

SEQ ID NO: 287 - protein, 737 aa, synthetic construct
  REGION 1..737: note = source = /note="Description of Artificial Sequence: Synthetic polypeptide"
RMAADGYLPDWLEDNLSEGIREWWDLKPGAPKPKANQQKQDDGRGLVLPGYKYLGPFNGLDKGEPVNAADAAALEHDKAYDQQLKAGDNPYLRYNHADAEFQERLQEDTSFGGNLGRAVFQAKKRVLEPLGLVEEGAKTAPGKKRPVEQSPQEPDSSSGIGKTGQQPAKKRLNFGQTGDSESVPDPQPLGEPPATPAAVGPTTMASGGGAPMADNNEGADGVGNASGNWHCDSTWLGDRVITTSTRTWALPTYNNHLYKQISSTSTGASNDNHYFGYGTPWGYFDFNRFHCHFSPRDWQRLINNNWGFRPKRLNFKLFNIQVEEVTTNDGVTTIANNLTSTVQVFSDSEYQLPYVLGSAHQGCLPPFPADVFMIPQYGYLTLNNGSQAVGRSSFYCLEYFPSQMLRTGNNFTFSYTFEEVPFHSSYAHSQSLDRLMNPLIDQYLYYLNRTQNQSGSAQNKDLLFSRGSPAGMSVQPKNWLPGPCYRQQRVSKTKTDNNNSNFTWTGASKYNLNGRESIINPGTAVASHKDDEDKFFPMSGVMIFGKESAGASSTALDNVMITDEEEIKATNPVATERFGTVAVNFQSSSTDPATGDVHAMGALPGMVWQDRDVYLQGPIWAKIPHTDGHFHPSPLMGGFGLKNPPPQILIKNTPVPANPPAEFSATKFASFITQYSTGQVSVEIEWELQKENSKRWNPEVQYTSNYAKSANVDFTVDNNGLYTEPRPIGTRYLTRPL

SEQ ID NO: 288 - protein, 736 aa, synthetic construct
  REGION 1..736: note = source = /note="Description of Artificial Sequence: Synthetic polypeptide"
MAADGYLPDWLEDNLSEGIREWWDLKPGAPKPKANQQKQDDGRGLVLPGYKYLGPFNGLDKGEPVNAADAAALEHDKAYDQQLKAGDNPYLRYNHADAEFQERLQEDTSFGGNLGRAVFQAKKRVLEPLGLVEEGAKTAPGKKRPVEQSPQEPDSSSGIGKTGQQPAKKRLNFGQTGDSESVPDPQPLGEPPATPAAVGPTTMASGGGAPMADNNEGADGVGNASGNWHCDSTWLGDRVITTSTRTWALPTYNNHLYKQISSTSTGASNDNHYFGYGTPWGYFDFNRFHCHFSPRDWQRLINNNWGFRPKRLNFKLFNIQVEEVTTNDGVTTIANNLTSTVQVFSDSEYQLPYVLGSAHQGCLPPFPADVFMIPQYGYLTLNNGSQAVGRSSFYCLEYFPSQMLRTGNNFTFSYTFEEVPFHSSYAHSQSLDRLMNPLIDQYLYYLNRTQNQSGSAQNKDLLFSRGSPAGMSVQPKNWLPGPCYRQQRVSKTKTDNNNSNFTWTGASKYNLNGRESIINPGTAVASHKDDEDKFFPMSGVMIFGKESAGASSTALDNVMITDEEEIKATNPVATERFGTVAVNFQSSSTDPATGDVHAMGALPGMVWQDRDVYLQGPIWAKIPHTDGHFHPSPLMGGFGLKNPPPQILIKNTPVPANPPAEFSATKFASFITQYSTGQVSVEIEWELQKENSKRWNPEVQYTSNYAKSANVDFTVDNNGLYTEPRPIGTRYLTRPL

SEQ ID NO: 289 - DNA, 2211 bp, synthetic construct
  misc_feature 1..2211: note = source = /note="Description of Artificial Sequence: Synthetic polynucleotide"
  source 1..2211: mol_type = other DNA
atggctgccgatggttatcttccagattggctcgaggacaacctctctgagggcattcgcgagtggtgggacttgaaacctggagccccgaagcccaaagccaaccagcaaaagcaggacgacggccggggtctggtgcttcctggctacaagtacctcggacccttcaacggactcgacaagggggagcccgtcaacgcggcggacgcagcggccctcgagcacgacaaggcctacgaccagcagctcaaagcgggtgacaatccgtacctgcggtataaccacgccgacgccgagtttcaggagcgtctgcaagaagatacgtcttttgggggcaacctcgggcgagcagtcttccaggccaagaagcgggttctcgaacctctcggtctggttgaggaaggcgctaagacggctcctggaaagaaacgtccggtagagcagtcgccacaagagccagactcctcctcgggcatcggcaagacaggccagcagcccgctaaaaagagactcaattttggccagactggcgactcagagtcagtccccgatccacaacctctcggagaacctccagcaacccccgctgctgtgggacctactacaatggcttcaggcggtggcgcaccaatggcagacaataacgaaggcgccgacggagtgggtaatgcctcaggaaattggcattgcgattccacatggctgggcgacagagtcatcaccaccagcacccgcacctgggccttgcccacctacaataaccacctctacaagcaaatctccagtacttcaacgggggccagcaacgacaaccactacttcggctacggcaccccctgggggtattttgatttcaacagattccactgccacttttcaccacgtgactggcagcgactcatcaacaacaattggggattccggcccaagagactcaacttcaaactcttcaacatccaagtcgaggaggtcacgacgaatgatggcgtcacaaccatcgctaataaccttaccagcacggttcaagtcttctcggactcggagtaccagcttccgtacgtcctcggctctgcgcaccagggctgcctccctccgttcccggcggacgtgttcatgattccgcaatacggctacctgacgctcaacaatggcagccaagccgtgggacgttcatccttttactgcctggaatatttcccttctcagatgctgagaacgggcaacaactttaccttcagctacacctttgaggaagtgcctttccacagcagctacgcgcacagccagagcctggaccggctgatgaatcctctcatcgaccaatacctgtattacctgaacagaacacaaaatcagtccggaagtgcccaaaacaaggacttgctgtttagccgtgggtctccagctggcatgtctgttcagcccaaaaactggctacctggaccctgttatcggcagcagcgcgtttctaaaacaaaaacagacaacaacaacagcaattttacctggactggtgcttcaaaatataacctcaatgggcgtgaatccatcatcaaccctggcaccgctgtggcctcacacaaagacgacgaagacaagttctttcccatgagcggtgtcatgatttttggaaaagagagcgccggagcttcaagcactgcattggacaatgtcatgattacagacgaagaggaaattaaagccactaaccctgtggccaccgaaagatttgggaccgtggcagtcaatttccagagcagcagcacagaccctgcgaccggagatgtgcatgctatgggagcattacctggcatggtgtggcaagatagagacgtgtacctgcagggtcccatttgggccaaaattcctcacacagatggacactttcacccgtctcctcttatgggcggctttggactcaagaacccgcctcctcagatcctcatcaaaaacacgcctgttcctgcgaatcctccggcggagttttcagctacaaagtttgcttcattcatcacccaatactccacaggacaagtgagtgtggaaattgaatgggagctgcagaaagaaaacagcaagcgctggaatcccgaagtgcagtacacatccaattatgcaaaatctgccaacgttgattttactgtggacaacaatggactttatactgagcctcgccccattggcacccgttaccttacccgtcccctgtaa

SEQ ID NO: 290 - protein, 737 aa, synthetic construct
  REGION 1..737: note = source = /note="Description of Artificial Sequence: Synthetic polypeptide"
RMAADGYLPDWLEDNLSEGIREWWDLKPGAPKPKANQQKQDDGRGLVLPGYKYLGPFNGLDKGEPVNAADAAALEHDKAYDQQLKAGDNPYLRYNHADAEFQERLQEDTSFGGNLGRAVFQAKKRVLEPLGLVEEGAKTAPGKKRPVEQSPQEPDSSSGIGKTGQQPAKKRLNFGQTGDSESVPDPQPLGEPPATPAAVGPTTMASGGGAPMADNNEGADGVGNASGNWHCDSTWLGDRVITTSTRTWALPTYNNHLYKQISSTSTGASNDNHYFGYSTPWGYFDFNRFHCHFSPRDWQRLINNNWGFRPKRLNFKLFNIQVEEVTTNDGVTTIANNLTSTVQVFSDSEYQLPYVLGSAHQGCLPPFPADVFMIPQYGYLTLNNGSQAVGRSSFYCLEYFPSQMLRTGNNFTFSYTFEEVPFHSSYAHSQSLDRLMNPLIDQYLYYLNRTQNQSGSAQNKDLLFSRGSPAGMSVQPKNWLPGPCYRQQRVSKTKTDNNNSNFTWTGASKYNLNGRESIINPGTAVASHKDDEDKFFPMSGVMIFGKESAGASSTALDNVMITDEEEIKATNPVATERFGTVAVNFQSSSTDPATGDVHAMGALPGMVWQDRDVYLQGPIWAKIPHTDGHFHPSPLMGGFGLKNPPPQILIKNTPVPANPPAEFSATKFASFITQYSTGQVSVEIEWELQKENSKRWNPEVQYTSNYAKSANVDFTVDNNGLYTEPRPIGTRYLTRPL

SEQ ID NO: 291 - protein, 737 aa, synthetic construct
  REGION 1..737: note = source = /note="Description of Artificial Sequence: Synthetic polypeptide"
RMAADGYLPDWLEDNLSEGIREWWDLKPGAPKPKANQQKQDDGRGLVLPGYKYLGPFNGLDKGEPVNAADAAALEHDKAYDQQLKAGDNPYLRYNHADAEFQERLQEDTSFGGNLGRAVFQAKKRVLEPLGLVEEGAKTAPGKKRPVEQSPQEPDSSSGIGKTGQQPAKKRLNFGQTGDSESVPDPQPLGEPPATPAAVGPTTMASGGGAPMADNNEGADGVGNASGNWHCDSTWLGDRVITTSTRTWALPTYNNHLYKQISSTSTGASNDNHYFGYSTPWGYFDFNRFHCHFSPRDWQRLINNNWGFRPKRLNFKLFNIQVKEVTTNDGVTTIANNLTSTVQVFSDSEYQLPYVLGSAHQGCLPPFPADVFMIPQYGYLTLNNGSQAVGRSSFYCLEYFPSQMLRTGNNFTFSYTFEEVPFHSSYAHSQSLDRLMNPLIDQYLYYLNRTQNQSGSAQNKDLLFSRGSPAGMSVQPKNWLPGPCYRQQRVSKTKTDNNNSNFTWTGASKYNLNGRESIINPGTAVASHKDDEDKFFPMSGVMIFGKESAGASSTALDNVMITDEEEIKATNPVATERFGTVAVNFQSSSTDPATGDVHAMGALPGMVWQDRDVYLQGPIWAKIPHTDGHFHPSPLMGGFGLKNPPPQILIKNTPVPANPPAEFSATKFASFITQYSTGQVSVEIEWELQKENSKRWNPEVQYTSNYAKSANVDFTVDNNGLYTEPRPIGTRYLTRPL

SEQ ID NO: 292 - protein, 737 aa, synthetic construct
  REGION 1..737: note = source = /note="Description of Artificial Sequence: Synthetic polypeptide"
RMAADGYLPDWLEDNLSEGIREWWDLKPGAPKPKANQQKQDDGRGLVLPGYKYLGPFNGLDKGEPVNAADAAALEHDKAYDQQLKAGDNPYLRYNHADAEFQERLQEDTSFGGNLGRAVFQAKKRVLEPLGLVEEGAKTAPGKKRPVEQSPQEPDSSSGIGKTGQQPAKKRLNFGQTGDSESVPDPQPLGEPPATPAAVGPTTMASGGGAPMADNNEGADGVGNASGNWHCDSTWLGDRVITTSTRTWALPTYNNHLYKQISSTSTGASNDNHYFGYSTPWGYFDFNRFHCHFSPRDWQRLINNNWGFRPKRLNFKLFNIQVKEVTTNDGVTTIANNLTSTVQVFSDSEYQLPYVLGSAHQGCLPPFPADVFMIPQYGYLTLNNGSQAVGRSSFYCLEYFPSQMLRTGNNFTFSYTFEEVPFHSSYAHSQSLDRLMNPLIDQYLYYLNRTQNQSGSAQNKDLLFSRGSPAGMSVQPKNWLPGPCYRQQRVSKTKTDNNNSNFTWTGASKYNLNGRESIINPGTAVASHKDDEDKFFPMSGVMIFGKESAGANSTALDNVMITDEEEIKATNPVATERFGTVAVNFQSSSTDPATGDVHAMGALPGMVWQDRDVYLQGPIWAKIPHTDGHFHPSPLMGGFGLKNPPPQILIKNTPVPANPPAEFSATKFASFITQYSTGQVSVEIEWELQKENSKRWNPEVQYTSNYAKSANVDFTVDNNGLYTEPRPIGTRYLTRPL

SEQ ID NO: 293 - DNA, 2208 bp, synthetic construct
  misc_feature 1..2208: note = source = /note="Description of Artificial Sequence: Synthetic polynucleotide"
  source 1..2208: mol_type = other DNA
atggctgccgatggttatcttccagattggctcaaggacactctctctgaaggaataagacagtggtggaagctcaaacctggcccaccaccaccaaagcccgcagagcggcataaggacgacagcgggggtcttgtgcttcctgggtacaagtacctcggacccttcaacggactcgacaagggagagccggtcaacgaggcagacgccgcggccctcgagtacgacaaggcctacgaccggcagctcgacagcggagacaacccgtacctcaagtacaaccacgccgacgcggagtttcaggagcgccttaaagaagatacgtcttttgggggcaacctcggacgagcagtcttccaggcgaaaaagagggttcttgaacctctgggcctggttgaggaacctgttaagacggctccgggaaaaaagaggccggtagagcactctcctgtggagccagactcctcctcgggaacaggaaaagcgggccagcagcctgcgagaaagagattgaattttggtcagactggagacgcagactccgtacctgacccccagcctctcggacagccaccagcagccccctctggtctgggaactaatacgatggctacaggcagtggcgcaccaatggcagacaataacgagggcgccgacggagtgggtaattcctcgggaagttggcattgcgattccacatggatgggcgacagagtcatcaccaccagcacccgaacctgggctctgcccacctacaacaaccatctgtacaagcagatctccagccaatcaggagccagcaacgacaaccactactttggctacagcaccccttgggggtattttgacttcaacagattccactgccacttttcaccacgtgactggcaaagactcatcaacaacaactggggattccggcccaagagactcaacttcaagctctttaacattcaagtcaaggaggtcacgcagaatgacggtacgacgacgattgccaataaccttaccagcacggttcaggtgtttactgactcggagtaccagctcccgtacgtccccggctcggcgcatcaaggatgcctcccgccgttcccagcagacgtcttcatggtgccacagtatggatacctcaccctgaacaacgggagtcaggcagtaggacgctcttcattttactgcctggagtactttccttctcagatgcttcgtaccggaaacaactttaccttcagctacacctttgaggatgttcctttccacagcagctacgctcacagccagagtttggaccgtctcatgaatcctctcatcgaccagtacctgtattacttgagcagaacaaacactccaagcggaaccaccacgcagtccaggcttcagttttctcaggccggagcaagtgacattcgggaccagtctaggaactggcttcctggaccctgttaccgccagcagcgagtatcaaagacagctgcggacaacaacaacagtgaatactcgtggactggagctaccaagtaccacctcaatggcagagactctctggtgaatccgggcccggccatggccagccacaaggacgatgaagaaaagttttttcctcaaagcggggttctcatctttgggaagcaaggctcagagaaaacaaatgtggacattgaaaaggtcatgattacagacgaagaggaaatcagaaccaccaatcccgtggccacggagcagtatggttctgtatctaccaacctccagagcggcaacacacaagcagctactgcagatgtcaacacacaaggcgttcttccaggcatggtctggcaggacagagacgtgcacctgcaggggcctatctgggcaaagattccacacacggacggacattttcacccctctcccctcatgggcggatttggacttaaacaccctcctccacagattctcatcaagaacaccccggtacctgcaaatccttcgaccaccttcagtgcggcaaagtttgcttccttcatcacacagtattccacagggcaggtcagcgtggagatcgagtgggagctgcagaaggagaacagcaaacgctggaaccccgagatccagtacacttccaactacaacaaatctgttaatgtggactttactgtggacactaatggtgtgtattcagagcctcgccccattggcaccagatacctgactcgtaatctgtaa

SEQ ID NO: 294 - protein, 735 aa, synthetic construct
  REGION 1..735: note = source = /note="Description of Artificial Sequence: Synthetic polypeptide"
MAADGYLPDWLKDTLSEGIRQWWKLKPGPPPPKPAERHKDDSGGLVLPGYKYLGPFNGLDKGEPVNEADAAALEYDKAYDRQLDSGDNPYLKYNHADAEFQERLKEDTSFGGNLGRAVFQAKKRVLEPLGLVEEPVKTAPGKKRPVEHSPVEPDSSSGTGKAGQQPARKRLNFGQTGDADSVPDPQPLGQPPAAPSGLGTNTMATGSGAPMADNNEGADGVGNSSGSWHCDSTWMGDRVITTSTRTWALPTYNNHLYKQISSQSGASNDNHYFGYSTPWGYFDFNRFHCHFSPRDWQRLINNNWGFRPKRLNFKLFNIQVKEVTQNDGTTTIANNLTSTVQVFTDSEYQLPYVPGSAHQGCLPPFPADVFMVPQYGYLTLNNGSQAVGRSSFYCLEYFPSQMLRTGNNFTFSYTFEDVPFHSSYAHSQSLDRLMNPLIDQYLYYLSRTNTPSGTTTQSRLQFSQAGASDIRDQSRNWLPGPCYRQQRVSKTAADNNNSEYSWTGATKYHLNGRDSLVNPGPAMASHKDDEEKFFPQSGVLIFGKQGSEKTNVDIEKVMITDEEEIRTTNPVATEQYGSVSTNLQSGNTQAATADVNTQGVLPGMVWQDRDVHLQGPIWAKIPHTDGHFHPSPLMGGFGLKHPPPQILIKNTPVPANPSTTFSAAKFASFITQYSTGQVSVEIEWELQKENSKRWNPEIQYTSNYNKSVNVDFTVDTNGVYSEPRPIGTRYLTRNL

SEQ ID NO: 295 - DNA, 2208 bp, synthetic construct
  misc_feature 1..2208: note = source = /note="Description of Artificial Sequence: Synthetic polynucleotide"
  source 1..2208: mol_type = other DNA
atggctgccgatggttatcttccagattggctcgaggacactctctctgaaggaataagacagtggtggaagctcaaacctggcccaccaccaccaaagcccgcagagcggcataaggacgacagcaggggtcttgtgcttcctgggtacaagtacctcggacccttcaacggactcgacaagggggagccggtcaacgaggcagacgccgcggccctcgagcacgacaaggcctacgaccggcagctcgacagcggagacaacccgtacctcaagtacaaccacgccgacgcagagtttcaggagcgccttaaagaagatacgtcttttgggggcaacctcggacgagcagtcttccaggcgaaaaagagggttcttgaacctctgggcctggttgaggaacctgttaagacggctccgggaaaaaagaggccggtagagcactctcctgtggagccagactcctcctcgggaaccggaaaagcgggccagcagcctgcaagaaaaagattaaattttggtcagactggagacgcagactccgtacctgacccccagcctctcggacagccaccagcagccccctctggtctgggatctactacaatggctacaggcagtggcgcaccaatggcagacaataacgagggtgccgatggagtgggtaattcctcaggaaattggcattgcgattcccaatggctgggcgacagagtcatcaccaccagcacccgaacctgggccctgcccacatacaacaaccacctctacaagcaaatctccagccaatcaggagccagcaacgacaaccactactttggctacagcaccccctgggggtattttgacttcaacagattccactgccacttttcaccacgtgactggcaaagactcatcaacaacaactggggattccggcccaaaagactcaacttcaagctctttaatattcaagtcaaagaggtcacgcagaatgacggtacgacgacgattgccaataaccttaccagcacggttcaggtgtttactgactcggagtaccagctcccgtacgtcctgggctcggcgcatcaaggatgcctcccgccgtttccagcggacgtcttcatggtcccacagtatggatacctcaccctgaacaacgggagtcaggcggtaggacgctcttccttttactgcctggagtactttccttctcagatgctgcgtactggaaacaactttcagttcagctacacttttgaagacgtgcctttccacagcagctacgctcacagccagagtctggatcggctgatgaatcctctgatcgaccagtacctgtattatctgaacaagacacaaacaaatagtggaactcttcagcagtctcggctactgtttagccaagctggaccaaccaacatgtctcttcaagctaaaaactggctgcctggaccttgctacagacagcagcgtctgtcaaaacaggcaaacgacaacaacaacagcaactttccctggactgcagctacaaagtatcatctaaatggccgggactcgttggttaatccaggaccagctatggccagtcgcaaggatgacgaagaaaagtttttccccatgcatggaaccctgatatttggtaaacaaggaacaaatgccaacgacgcggatttggaaaatgtcatgattacagatgaagaagaaatcagggccaccaatcccgtggctacggagcagtacgggactgtgtcaaataatttgcaaaactcaaacactggtccaactactggaactgtcaatcaccaaggagcgttacctggtatggtgtggcaggatcgagacgtgtacctgcagggacccatttgggccaagattcctcacaccgatggacactttcatccttctccactgatgggaggttttggactcaaacacccgcctcctcagatcatgatcaaaaacactcccgttccagccaatcctcccacaaacttcagttctgccaagtttgcttctttcatcacacagtattccacgggacaggtcagcgtggagatcgagtgggagctgcagaaggagaacagcaaacgctggaatcccgaaattcagtacacttccaactacaacaagtctgttaatgtggactttactgtggacactaatggtgtgtattcagagcctcgccccattggcaccagatacctgactcgtaatctgtaa

SEQ ID NO: 296 - protein, 735 aa, synthetic construct
  REGION 1..735: note = source = /note="Description of Artificial Sequence: Synthetic polypeptide"
MAADGYLPDWLEDTLSEGIRQWWKLKPGPPPPKPAERHKDDSRGLVLPGYKYLGPFNGLDKGEPVNEADAAALEHDKAYDRQLDSGDNPYLKYNHADAEFQERLKEDTSFGGNLGRAVFQAKKRVLEPLGLVEEPVKTAPGKKRPVEHSPVEPDSSSGTGKAGQQPARKRLNFGQTGDADSVPDPQPLGQPPAAPSGLGSTTMATGSGAPMADNNEGADGVGNSSGNWHCDSQWLGDRVITTSTRTWALPTYNNHLYKQISSQSGASNDNHYFGYSTPWGYFDFNRFHCHFSPRDWQRLINNNWGFRPKRLNFKLFNIQVKEVTQNDGTTTIANNLTSTVQVFTDSEYQLPYVLGSAHQGCLPPFPADVFMVPQYGYLTLNNGSQAVGRSSFYCLEYFPSQMLRTGNNFQFSYTFEDVPFHSSYAHSQSLDRLMNPLIDQYLYYLNKTQTNSGTLQQSRLLFSQAGPTNMSLQAKNWLPGPCYRQQRLSKQANDNNNSNFPWTAATKYHLNGRDSLVNPGPAMASRKDDEEKFFPMHGTLIFGKQGTNANDADLENVMITDEEEIRATNPVATEQYGTVSNNLQNSNTGPTTGTVNHQGALPGMVWQDRDVYLQGPIWAKIPHTDGHFHPSPLMGGFGLKHPPPQIMIKNTPVPANPPTNFSSAKFASFITQYSTGQVSVEIEWELQKENSKRWNPEIQYTSNYNKSVNVDFTVDTNGVYSEPRPIGTRYLTRNL

SEQ ID NO: 297 - DNA, 2208 bp, synthetic construct
  misc_feature 1..2208: note = source = /note="Description of Artificial Sequence: Synthetic polynucleotide"
  source 1..2208: mol_type = other DNA
atggctgccgatggttatcttccagattggctcgaggacactctctctgaaggaataagacagtggtggaagctcaaacctggcccaccaccaccaaagcccgcagagcggcataaggacgacagcaggggtcttgtgcttcctgggtacaagtacctcggacccttcaacggactcgacaagggagagccggtcaacgaggcagacgccgcggccctcgagcacgacaaagcctacgaccggcagctcgacagcggagacaacccgtacctcaagtacaaccacgccgacgcggagtttcaggagcgccttaaagaagatacgtcttttgggggcaacctcggacgagcagtcttccaggcgaaaaagagggttcttgaacctctgggcctggttggggaacctgtcaagacggctccaggaaaaaagaggccggtagagcactctcctgtggagccagactcctcctcgggaaccggaaaggcgggccagcagcctgcaagaaaaagattgaattttggtcagactggagacgcagactcagtacctgacccccagcctctcggacagccaccagcagccccctctggtctgggaactaatacgatggctacaggcagtggcgcaccaatggcagacaataacgagggcgccgacggagtgggtaattcctcgggaaattggcattgcgattccacatggatgggcgacagagtcatcaccaccagcacccgaacctgggccctgcccacctacaacaaccacctctacaaacaaatttccagccaatcaggagcctcgaacgacaatcactactttggctacagcaccccttgggggtattttgacttcaacagattccactgccacttttcaccacgtgactggcaaagactcatcaacaacaactggggattccgacccaagagactcaacttcaagctctttaacattcaagtcaaagaggtcacgcagaatgacggtacgacgacgattgccaataaccttaccagcacggttcaggtgtttactgactcggagtaccagctcccgtacgtcctcggctcggcgcatcaaggatgcctcccgccgttcccagcagacgtcttcatggtgccacagtatggatacctcaccctgaacaacgggagtcaggcagtaggacgctcttcattttactgcctggagtactttccttctcagatgctgcgtaccggaaacaactttaccttcagctacacttttgaggacgttcctttccacagcggctacgctcacagccagagtctggaccgtctcatgaatcctctcatcgaccagtacctgtattacttgagcacaacaaacactccaagtggaaccaccacgcagtcaaggcttcagttttctcaggccggagcgagtgacattcgggaccagtctaggaactggcttcctggaccctgttaccgccagcagcgagtatcaaagacatctgcggataacaacaacagtgaatactcgtggactggagctaccaagtaccacctcaatggcagagactctctggtgaatccgggcccggccatggcaagccacaaggacaatgaagaaaagttttttcctcagagcggggttctcatctttgggaagcaaggctcagagaaaacaaatgtggacattgaaaaggtcatgattacagacgaagaggaaatcaggacaaccaatcccgtggctacggagcagtacggttctgtatctaccaacctccagagaggcaacagacaagcagctaccgcagatgtcaacacacaaggcgttcttccaggcatggtctggcaggacagagatgtgtaccttcaggggcccatctgggcaaagattccacacacggacggacattttcacccctctcccctcatgggtggattcggacttaaacaccctcctccacagattctcatcaagaacaccccggtacctgcgaatccttcgaccaccttcagtgcggcaaagtttgcttccttcatcacacagtactccacgggacaggtcagcgtggagatcgagtgggagctgcagaaggaaaacagcaaacgctggaatcccgaaattcagtacacttccaactacaacaagtctgttaatgtggactttactgtggacactaatggcgtgtattcagagcctcgccccattggcaccagatacctgactcgtaatctgtaa

SEQ ID NO: 298 - protein, 735 aa, synthetic construct
  REGION 1..735: note = source = /note="Description of Artificial Sequence: Synthetic polypeptide"
MAADGYLPDWLEDTLSEGIRQWWKLKPGPPPPKPAERHKDDSRGLVLPGYKYLGPFNGLDKGEPVNEADAAALEHDKAYDRQLDSGDNPYLKYNHADAEFQERLKEDTSFGGNLGRAVFQAKKRVLEPLGLVGEPVKTAPGKKRPVEHSPVEPDSSSGTGKAGQQPARKRLNFGQTGDADSVPDPQPLGQPPAAPSGLGTNTMATGSGAPMADNNEGADGVGNSSGNWHCDSTWMGDRVITTSTRTWALPTYNNHLYKQISSQSGASNDNHYFGYSTPWGYFDFNRFHCHFSPRDWQRLINNNWGFRPKRLNFKLFNIQVKEVTQNDGTTTIANNLTSTVQVFTDSEYQLPYVLGSAHQGCLPPFPADVFMVPQYGYLTLNNGSQAVGRSSFYCLEYFPSQMLRTGNNFTFSYTFEDVPFHSGYAHSQSLDRLMNPLIDQYLYYLSTTNTPSGTTTQSRLQFSQAGASDIRDQSRNWLPGPCYRQQRVSKTSADNNNSEYSWTGATKYHLNGRDSLVNPGPAMASHKDNEEKFFPQSGVLIFGKQGSEKTNVDIEKVMITDEEEIRTTNPVATEQYGSVSTNLQRGNRQAATADVNTQGVLPGMVWQDRDVYLQGPIWAKIPHTDGHFHPSPLMGGFGLKHPPPQILIKNTPVPANPSTTFSAAKFASFITQYSTGQVSVEIEWELQKENSKRWNPEIQYTSNYNKSVNVDFTVDTNGVYSEPRPIGTRYLTRNL

SEQ ID NO: 299 - DNA, 2208 bp, synthetic construct
  misc_feature 1..2208: note = source = /note="Description of Artificial Sequence: Synthetic polynucleotide"
  source 1..2208: mol_type = other DNA
atggctgccgatggttatcttccagattggctcgaggacactctctctgaaggaataagacagtggtggaagctcaaacctggcccaccaccaccaaagcccgcagagcggcataaggacgacagcaggggtcttgtgcttcctgggtacaagtacctcggacccttcaacggactcgacaagggagagccggtcaacgaggcagacgccgcggccctcgagcacgacaaagcctacgaccggcagctcgacagcggagacaacccgtacctcaagtacaaccacgccgacgcggagtttcaggagcgccttaaagaagatacgtcttttgggggcaacctcggacgagcagtcttccaggcgaaaaagagggttcttgaacctctgggcctggttggggaacctgttaagacggctccgggaaaaaagaggccggtagagcactctcctgtggagccagactcctcctcgggaaccggaaaggcgggccagcagcctgcaagaaaaagattgaattttggtcagactggagacgcagactcagtacctgacccccagcctctcggacagccaccagcagccccctctggtctgggaactaatacgatggctacaggcagtggcgcaccaatggcagacaataacgagggcgccgacggagtgggtaattcctcgggaaatcggcattgcgattccacatggatgggcgacagagtcatcaccaccagcacccgaacctgggccctgcccacctacaacaaccacctctacagacaaatttccagccaatcaggagcctcgaacgacaatcactactttggctacagcaccccttgggggtattttgacttcaacagattccactgccacttttcaccacgtgactggcaaagactcatcaacaacaactggggattccgacccaagagactcaacttcaagctctttaacattcaagtcaaagaggtcacgcagaatgacggtacgacgacgattgccaataaccttaccagcacggttcaggtgtttactgactcggagtaccagctcccgtacgtcctcggctcggcgcatcaaggatgcctcccgccgttcccagcagacgtcttcatggtgccacagtatggatacctcaccctgagcaacgggagtcaggcagtaggacgctcttcattttactgcccggagtactttccttctcagatgctgcgtaccggaaacaactttaccttcagctacacttttgaggacgttcctttccacagcagctacgctcacagccagagtctggaccgtctcatgaatcctctcatcgaccagtacctgtattacttgagcacaacaaacactccaagtggaaccaccacgcagtcaaggcttcagttttctcaggccggagcgagtgacattcgggaccagtctaggaactggcttcctggaccctgttaccgccagcagcgagtatcaaagacatctgcggataacaacaacagtgaatactcgtggactggagctaccaagtaccacctcaatggcagagactctctggtgaatccgggcccggccatggcaagccacaaggacaatgaagaaaagttttttcctcagagcggggttctcatctttgggaagcaaggctcagagaaaacaaatgtggacattgaaaaggtcatgattacagacgaagaggaaatcaggacaaccaatcccgtggctacggagcagtatggttctgtatctaccaacctccagagaggcaacagacaagcagctaccgcagatgtcaacacacaaggcgttcttccaggcatggtctggcaggacagagatgtgtaccttcaggggcccatctgggcaaagattccacacacggacggacattttcacccctctcccctcatgggtggattcggacctaaacaccctcctccacagattctcatcaagaacaccccggtacctgcgaatccttcgaccaccttcagtgcggcaaagtttgcttccttcatcacacagtactccacgggacaggtcagcgtggagatcgagtgggagctgcagaaggaaaacagcaaacgctggaatcccgaaattcagtacacttccaactacaacaagtctgttaatgtggactttactgtggacactaatggcgtgtattcagagcctcgccccattggcaccagatacctgactcgtaatttgtaa

SEQ ID NO: 300 - protein, 735 aa, synthetic construct
  REGION 1..735: note = source = /note="Description of Artificial Sequence: Synthetic polypeptide"
MAADGYLPDWLEDTLSEGIRQWWKLKPGPPPPKPAERHKDDSRGLVLPGYKYLGPFNGLDKGEPVNEADAAALEHDKAYDRQLDSGDNPYLKYNHADAEFQERLKEDTSFGGNLGRAVFQAKKRVLEPLGLVGEPVKTAPGKKRPVEHSPVEPDSSSGTGKAGQQPARKRLNFGQTGDADSVPDPQPLGQPPAAPSGLGTNTMATGSGAPMADNNEGADGVGNSSGNRHCDSTWMGDRVITTSTRTWALPTYNNHLYRQISSQSGASNDNHYFGYSTPWGYFDFNRFHCHFSPRDWQRLINNNWGFRPKRLNFKLFNIQVKEVTQNDGTTTIANNLTSTVQVFTDSEYQLPYVLGSAHQGCLPPFPADVFMVPQYGYLTLSNGSQAVGRSSFYCPEYFPSQMLRTGNNFTFSYTFEDVPFHSSYAHSQSLDRLMNPLIDQYLYYLSTTNTPSGTTTQSRLQFSQAGASDIRDQSRNWLPGPCYRQQRVSKTSADNNNSEYSWTGATKYHLNGRDSLVNPGPAMASHKDNEEKFFPQSGVLIFGKQGSEKTNVDIEKVMITDEEEIRTTNPVATEQYGSVSTNLQRGNRQAATADVNTQGVLPGMVWQDRDVYLQGPIWAKIPHTDGHFHPSPLMGGFGPKHPPPQILIKNTPVPANPSTTFSAAKFASFITQYSTGQVSVEIEWELQKENSKRWNPEIQYTSNYNKSVNVDFTVDTNGVYSEPRPIGTRYLTRNL

SEQ ID NO: 301 - DNA, 2205 bp, synthetic construct
  misc_feature 1..2205: note = source = /note="Description of Artificial Sequence: Synthetic polynucleotide"
  source 1..2205: mol_type = other DNA
atggctgccgatggttatcttccagattggctcgaggacactctctctgaaggaataagacagtggtggaagctcaaacctggcccaccaccaccaaagcccgcagagcggcataaggacgacagcaggggtcttgtgcttcctgggtacaagtacctcggacccttcaacggactcgacaagggagagccggtcaacgaggcagacgccgcggccctcgagcacgacaaggcctacgaccggcagctcgacagcggagacaacccgtacctcaagtacaaccacgccgacgcggagtttcaggagcgtcttaaagaagatacgtcttttgggggcaacctcggacgagcagtcttccaggcgaaaaagagggttcttgaacctctgggcctggttgaggaacctgttaagacggctccgggaaaaaagaggccggtagagcactctcctgcggagccagactcctcctcgggaaccggaaaagcgggccagcagcctgcaagaaaaagactgaatttcggtcagactggagacgcagactccgtacctgacccccagcctctcagacagccaccagcagcccccacaagtttgggatctactacaatggctacaggcagtggcgcaccaatggcagacaataacgagggtgccgatggagtgggtaattcctcaggaaattggcattgcgattcccaatggctgggcgacagagtcatcaccaccagcacccgaacctgggccctgcccacctacaacaaccacctttacaagcaaatctccagccaatcaggagcctcaaacgacaaccactactttggctacagcaccccctgggggtattttgacttcaacagattccactgccacttttcaccacgtgactggcaaagactcatcaacaacaactggggattccgacccaagagactcaacttcaagctctttaacattcaagtcaaagaggtcacgcagaatgacggtacgacgacgattgccaataaccttaccagcacggttcaggtgtttactgactcggagtaccagctcccgtacgtcctcggctcggcgcatcaaggatgcctcccgccgtttccagcggacgtcttcatggtcccacagtatggatacctcaccctgaacaacgggagtcaggcggtaggacgctcttccttttactgcctggagtactttccttctcagatgctgcgtactggaaacaactttcagttcagctacacttttgaagacgtgcctttccacagcagctacgctcacagccagagtttggatcggctgatgaatcctctgatcgaccagtacctgtattatctaaacagaacacaaacagctagtggaactcagcagtctcggctactgtttagccaagctggacccacaagcatgtctcttcaagctaaaaactggctgcctggaccgtgttatcgccagcagcgtttgtcaaagcaggcaaacgacaacaacaacagcaactttccctggactggagctaccaagtactacctcaatggcagagactctttggtgaacccgggcccggccatggccagccacaaggacgatgaagaaaagtttttccccatgcatggaaccctaatatttggtaaagaaggaacaaatgctaccaacgcggaattggaaaatgtcatgattacagatgaagaggaaatcaggaccaccaatcccgtggctacagagcagtacggatatgtgtcaaataatttgcaaaactcaaatactgctgcaagtactgaaactgtgaatcaccaaggagcattacctggtatggtgtggcaggatcgagacgtgtacctgcagggacccatttgggccaagattcctcacaccgatggacactttcatccttctccactgatgggaggttttggactcaaacacccgcctcctcagattatgatcaaaaacactcccgttccagccaatcctcccacaaacttcagttctgccaagtttgcttccttcatcacacagtattccacgggacaggtcagcgtggagatcgagtgggagctgcagaaggagaacagcaaacgctggaatcccgaaattcagtacacttccaactacaacaaatctgttaatgtggactttactgtggacactaatggtgtgtattcagagcctcgccccattggcaccagatacctgactcgtaatctgtaa

SEQ ID NO: 302 - protein, 734 aa, synthetic construct
  REGION 1..734: note = source = /note="Description of Artificial Sequence: Synthetic polypeptide"
MAADGYLPDWLEDTLSEGIRQWWKLKPGPPPPKPAERHKDDSRGLVLPGYKYLGPFNGLDKGEPVNEADAAALEHDKAYDRQLDSGDNPYLKYNHADAEFQERLKEDTSFGGNLGRAVFQAKKRVLEPLGLVEEPVKTAPGKKRPVEHSPAEPDSSSGTGKAGQQPARKRLNFGQTGDADSVPDPQPLRQPPAAPTSLGSTTMATGSGAPMADNNEGADGVGNSSGNWHCDSQWLGDRVITTSTRTWALPTYNNHLYKQISSQSGASNDNHYFGYSTPWGYFDFNRFHCHFSPRDWQRLINNNWGFRPKRLNFKLFNIQVKEVTQNDGTTTIANNLTSTVQVFTDSEYQLPYVLGSAHQGCLPPFPADVFMVPQYGYLTLNNGSQAVGRSSFYCLEYFPSQMLRTGNNFQFSYTFEDVPFHSSYAHSQSLDRLMNPLIDQYLYYLNRTQTASGTQQSRLLFSQAGPTSMSLQAKNWLPGPCYRQQRLSKQANDNNNSNFPWTGATKYYLNGRDSLVNPGPAMASHKDDEEKFFPMHGTLIFGKEGTNATNAELENVMITDEEEIRTTNPVATEQYGYVSNNLQNSNTAASTETVNHQGALPGMVWQDRDVYLQGPIWAKIPHTDGHFHPSPLMGGFGLKHPPPQIMIKNTPVPANPPTNFSSAKFASFITQYSTGQVSVEIEWELQKENSKRWNPEIQYTSNYNKSVNVDFTVDTNGVYSEPRPIGTRYLTRNL

SEQ ID NO: 303 - DNA, 3160 bp, synthetic construct
  misc_feature 1..3160: note = source = /note="Description of Artificial Sequence: Synthetic polynucleotide"
  source 1..3160: mol_type = other DNA
acccttcactaaagggactagtcctgcaggtttaaacgaattcgcccttgctgcgtcaactggaccaatgagaactttcccttcaacgactgtgtcgacaagatggtgatttggtgggaggaggggaagatgaccgccaaggtcgtggagtcggccaaagccattctcggaggaagcaaggtgcgcgtggaccagaaatgcaagtcctcggcccagatagatccgactcccgtgatcgtcacctccaacaccaacatgtgcgccgtgattgacgggaactcaacgaccttcgaacaccagcagccgttgcaagaccggatgttcaaatttgaactcacccgccgtctggatcatgactttgggaaggtcaccaagcgggaagtcaaagactttttccggtgggcaaaggatcacgtggttgaggtggagcatgaattctacgtcaaaaagggtggagccaagaaaagacccgcccctagtgacgcagatataagtgagcccaaacgggtgcgcgagtcagttgcgcagccatcgacgtcagacgcggaagcttcgatcaactacgcggacaggtaccaaaacaaatgttctcgtcacgtgggcatgaatctgatgctgtttccctgcagacaatgcgagagaatgaatcaaaattcaaatatctgcttcactcacggacagaaagactgtttagagtgctttcccgtgtcagaatctcaacctgtttctgtcgtcaaaaaggcgtatcagaaactgtgctacattcatcatatcatgggaaaggtgccagacgcttgcactgcctgcgatctggtcaatgtggatttggatgactgcatctctgaacaataaatgatttaaatcaggtatggctgccgatggttatcttccagattggctcgaggacactctctctgaaggaataagacagtggtggaagctcaaacctggcccaccaccaccaaagcccgcagagcggcataaggacgacagcaggggtcttgtgcttcctgggtacaagtacctcggacccttcaacggactcgacaagggagagccggtcaacgaggcagacgccgcggccctcgagcacgacaaggcctacgaccggcagctcgacagcggagacaacccgtacctcaagtacaaccacgccgacgcggagtttcaggagcgtcttaaagaagatacgtcttttgggggcaacctcggacgagcagtcttccaggcgaaaaagagggttcttgaacctctgggcctggttgaggaacctgttaagacggctccgggaaaaaagaggccggtagagcactctcctgcggagccagactcctcctcgggaaccggaaaagcgggccagcagcctgcaagaaaaagactgaatttcggtcagactggagacgcagactccgtacctgacccccagcctctcagacagccaccagcagcccccacaagtttgggatctactacaatggctacaggcagtggcgcaccaatggcagacaataacgagggtgccgatggagtgggtaattcctcaggaaattggcattgcgattcccaatggctgggcgacagagtcatcaccaccagcacccgaacctgggccctgcccacctacaacaaccacctttacaagcaaatctccagccaatcaggagcctcaaacgacaaccactactttggctacagcaccccctgggggtattttgacttcaacagattccactgccacttttcaccacgtgactggcaaagactcatcaacaacaactggggattccgacccaagagactcaacttcaagctctttaacattcaagtcaaagaggtcacgcagaatgacggtacgacgacgattgccaataaccttaccagcacggttcaggtgtttactgactcggagtaccagctcccgtacgtcctcggctcggcgcatcaaggatgcctcccgccgtttccagcggacgtcttcatggtcccacagtatggatacctcaccctgaacaacgggagtcaggcggtaggacgctcttccttttactgcctggagtactttccttctcagatgctgcgtactggaaacaactttcagttcagctacacttttgaagacgtgcctttccacagcagctacgctcacagccagagtttggatcggctgatgaatcctctgatcgaccagtacctgtattatctaaacagaacacaaacagctagtggaactcagcagtctcggctactgtttagccaagctggacccacaagcatgtctcttcaagctaaaaactggctgcctggaccgtgttatcgccagcagcgtttgtcaaagcaggcaaacgacaacaacaacagcaactttccctggactggagctaccaagtactacctcaatggcagagactctttggtgaacccgggcccggccatggccagccacaaggacgatgaagaaaagtttttccccatgcatggaaccctaatatttggtaaagaaggaacaaatgctaccaacgcggaattggaaaatgtcatgattacagatgaagaggaaatcaggaccaccaatcccgtggctacagagcagtacggatatgtgtcaaataatttgcaaaactcaaatactgctgcaagtactgaaactgtgaatcaccaaggagcattacctggtatggtgtggcaggatcgagacgtgtacctgcagggacccatttgggccaagattcctcacaccgatggacactttcatccttctccactgatgggaggttttggactcaaacacccgcctcctcagattatgatcaaaaacactcccgttccagccaatcctcccacaaacttcagttctgccaagtttgcttccttcatcacacagtattccacgggacaggtcagcgtggagatcgagtgggagctgcagaaggagaacagcaaacgctggaatcccgaaattcagtacacttccaactacaacaaatctgttaatgtggactttactgtggacactaatggtgtgtattcagagcctcgccccattggcaccagatacctgactcgtaatctgtaattgcttgttaatcaataaaccgtttaattcgtttcagttgaactttggtctctgcgaagggcgaattcgcggccgctaaatcaatcg

SEQ ID NO: 304 - protein, 734 aa, synthetic construct
  REGION 1..734: note = source = /note="Description of Artificial Sequence: Synthetic polypeptide"
MAADGYLPDWLEDTLSEGIRQWWKLKPGPPPPKPAERHKDDSRGLVLPGYKYLGPFNGLDKGEPVNEADAAALEHDKAYDRQLDSGDNPYLKYNHADAEFQERLKEDTSFGGNLGRAVFQAKKRVLEPLGLVEEPVKTAPGKKRPVEHSPAEPDSSSGTGKAGQQPARKRLNFGQTGDADSVPDPQPLGQPPAAPTSLGSTTMATGSGAPMADNNEGADGVGNSSGNWHCDSQWLGDRVITTSTRTWALPTYNNHLYKQISSQSGASNDNHYFGYSTPWGYFDFNRFHCRFSPRDWQRLINNNWGFRPKRLNFKLFNIQVKEVTQNDGTTTIANNLTSTVQVFTDSEYQLPYVLGSAHQGCLPPFPADVFMVPQYGYLTLNNGSQAVGRSSFYCLEYFPSQMLRTGNNFQFSYTFEDVPFHSSYAHSQGLDRLMNPLIDQYLYYLNRTQTASGTQQSRLLFSQAGPTSMSLQAKNWLPGPCYRQQRLSKQANDNNNSNFPWTGATKYHLNGGDSLVNPGPAMASHKDDEEKFFPMHGTLIFGKEGTNATNAELENVMITDEEEIRTTNPVATEQYGYVSNNLQNSNTAASTETVNHQGALPGMVWQDRDVYLRGPIWAKIPHADGHFHPSPLMGGFGLKHPPPQIMIKNTPVPANPPTNFSSAKFASFITQYSTGQVSVEIEWELQKENSKRWNPEIQYTSNYNKSVNVDFTVDTNGVYSEPRPIGTRYLTRNL

SEQ ID NO: 305 - DNA, 3157 bp, synthetic construct
  misc_feature 1..3157: note = source = /note="Description of Artificial Sequence: Synthetic polynucleotide"
  source 1..3157: mol_type = other DNA
ctcactaagggactagtcctgcaggtttaaacgaattcgcccttgctgcgtcaactggaccaatgagaactttcccttcaacgactgtgtcgacaagatggtgatttggtgggaggaggggaagatgaccgccaaggtcgtggagtcggccaaagccactctcggaggaagcaaggtgcgcgtggaccagaaacgcaagtcctcggcccagatagatccgactcccgtgatcgtcacctccaacaccaacatgtgcgccgtgattgacgggaactcaacgaccttcgaacaccagcagccgttgcaagaccgaatgttcaaatttgaactcacccgccgtctggatcatgacttcgggaaggtcaccaagcaggaagtcaaagactttttccggtgggcaaaggatcacgtggttgaggtggagcatgaattctacgtcaaaaagggtggagccaagaaaagacccgcccctagtgacgcagatataagtgagcccaaacgggtgcgcgagtcagttgcgcagccatcgacgtcagacgcggaagcttcgatcaactacgcggacaggtaccaaaacaaatgttctcgtcacgtgggcatgaatctgatgctgtttccctgcagacaatgcgagagaatgaatcaaaattcaaatatctgcttcactcacggacagaaagactgtttagagtgctttcccgtgtcagaatctcaacctgtttctgtcgtcaaaaaggcgtatcagaaactgtgctacattcatcatatcatgggaaaggtgccagacgcttgcactgcctgcgatctggtcaatgtggatttggatgactgcatctctgaacaataaatgatttaaatcaggtatggctgccgatggttatcttccagattggctcgaggacactctctctgaaggaataagacagtggtggaagctcaaacctggcccaccaccaccaaagcccgcagagcggcataaggacgacagcaggggtcttgtgcttcctgggtacaagtacctcggacccttcaacggactcgacaagggagagccggtcaacgaggcagacgccgcggctctcgagcacgacaaggcctacgaccggcagctcgacagcggagacaacccgtacctcaagtacaaccacgccgacgcggagtttcaggagcgtcttaaagaagatacgtcttttgggggcaacctcggacgagcagtcttccaggcgaaaaagagggttcttgaacctctgggcctggttgaggaacctgttaagacggctccgggaaaaaagaggccggtagagcactctcctgcggagccagactcctcctcgggaaccggaaaagcgggccagcagcctgcaagaaaaagactgaatttcggtcagactggagacgcagactccgtacctgacccccagcctctcggacagccaccagcagcccccacaagtttgggatctactacaatggctacaggcagtggcgcaccaatggcagacaataacgagggtgccgatggagtgggtaattcctcaggaaattggcattgcgattcccaatggctgggcgacagagtcatcaccaccagcacccgaacctgggccctgcccacctacaacaaccacctttacaagcaaatctccagccaatcaggagcctcaaacgacaaccactactttggctacagcaccccctgggggtattttgacttcaacagattccactgccgcttttcaccacgtgactggcaaagactcatcaacaacaactggggattccgacccaagagactcaacttcaagctctttaacattcaagtcaaagaggtcacgcagaatgacggtacgacgacgattgccaataaccttaccagcacggttcaggtgtttactgactcggagtaccagctcccgtacgtcctcggctcggcgcatcaaggatgcctcccgccgtttccagcggacgtcttcatggtcccacagtatggatacctcaccctgaacaacgggagtcaggcggtaggacgctcttccttttactgcctggagtactttccttctcagatgctgcgtactggaaacaactttcagttcagctacacttttgaagacgtgcctttccacagcagctacgctcacagccagggtttggatcggctgatgaatcctctgatcgaccagtacctgtattatctaaacagaacacaaacagctagtggaactcagcagtctcggctactgtttagccaagctggacccacaagcatgtctcttcaagctaaaaactggctgcctggaccgtgttatcgccagcagcgtttgtcaaagcaggcaaacgacaacaacaacagcaactttccctggactggagctaccaagtaccacctcaatggcggagactctttggtgaacccgggcccggccatggccagccacaaggacgatgaagaaaagtttttccccatgcatggaaccctaatatttggtaaagaaggaacaaatgctaccaacgcggaattggaaaatgtcatgattacagatgaagaggaaatcaggaccaccaatcccgtggctacagagcagtacggatatgtgtcaaataatttgcaaaactcaaatactgctgcaagtactgaaactgtgaatcaccaaggagcattacctggtatggtgtggcaggatcgagacgtgtacctgcggggacccatttgggccaagattcctcacgccgatggacactttcatccttctccactgatgggaggttttggactcaaacacccgcctcctcagattatgatcaaaaacactcccgttccagccaatcctcccacaaacttcagttctgccaagtttgcttccttcatcacacagtattccacgggacaggtcagcgtggagatcgagtgggagctgcagaaggagaacagcaaacgctggaatcccgaaattcagtacacttccaactacaacaaatctgttaatgtggactttactgtggacactaatggtgtgtattcagagcctcgccccattggcaccagatacctgactcgtaatctgtaattgcttgttaatcaataaaccgtttaattcgtttcagttgaactttggtctctgcgaagggcgaattcgcggccgctaaattcaattcg

SEQ ID NO: 306 - protein, 734 aa, synthetic construct
  REGION 1..734: note = source = /note="Description of Artificial Sequence: Synthetic polypeptide"
MAADGYLPDWLEDTLSEGIRQWWKLKPGPPPPKPAERHKDDSRGLVLPGYKYLGPFNGLDKGEPVNEADAAALEHDKAYDRQLDSGDNPYLKYNHADAEFQERLKEDTSFGGNLGRAVFQAKKRVLEPLGLVEEPVKTAPGKKRPVEHSPAEPDSSSGTGKAGQQPARKRLNFGQTGDADSVPDPQPLGQPPAAPTSLGSTTMATGSGAPMADNNEGADGVGNSSGNWHCDSQWLGDRVITTSTRTWALPTYNNHLYKQISSQSGASNDNHYFGYSTPWGYFDFNRFHCHFSPRDWQRLINNNWGFRPKRLNFKLFNIQVKEVTQNDGTTTIANNLTSTVQVFTDSEYQLPYVLGSAHQGCLPPFPADVFMVPQYGYLTLNNGSQAVGRSSFYCLECFPSQMLRTGNNFQFSYTFEDVPFHSSYAHSQSLDRLMNPLIDQYLYYLNRTQTASGTQQSRLLFSQAGPTSMSLQAKNWLPGPCYRQQRLSKQANDNNNSNFPWTGATKYHLNGRDSLVNPGPAMASHKDDEEKFFPMHGTLIFGKEGTNATNAELENVMITDEEEIRTTNPVATEQYGYVSNNLQNSNTAASTETVNHQGALPGMVWQDRDVYLQGPIWAKIPHTDGHFHPSPLMGGFGLKHPPPQIMIKNTPVPANPPTNFSSAKFASFITQYSTGQVSVEIEWELQKENSKRWNPEIQYTSNYNKSVNVDFTVDTNGVYSEPRPIGTRYLTRNL

SEQ ID NO: 307 - DNA, 2208 bp, synthetic construct
  misc_feature 1..2208: note = source = /note="Description of Artificial Sequence: Synthetic polynucleotide"
  source 1..2208: mol_type = other DNA
atggctgccgatggttatcttccagattggctcgaggacactctctctgaaggaataagacagtggtggaagctcaaacctggcccaccaccaccaaagcccgcagagcggcataaggacgacagcaggggtcttgtgcttcctggatacaagtacctcggacccttcaacggactcgacaagggagagccggtcaacgaggcagacgccgcggccctcgagcacgacaaggcctacgaccggcagctcgacagcggagacaacccgtacctcaagtacaaccacgccgacgcggagtttcaggagcgccttaaagaagatacgtcttttgggggcaacctcggacgagcagtcttccaggcgaaaaagagggttcttgaacctctgggcctggttgaggaacctgttaagacggctccgggaaaaaagaggccggtagagcactctcctgtggagccagactcctcctcgggaaccggaaaagcgggcaaccagcctgcaagaaaaagattgaatttcggtcagactggagacgcagactccgtacctgacccccagcctctcggacagccaccagcatccccctctggtctgggaactaatacgatggctacaggcagtggcgcaccaatggcagacaataacgagggcgccgacggagtgggtaattcctcgggaaattggcattgcgattccacatggatgggcgacagagtcgtcaccaccagcacccgcacctgggccctgcccacctacaacaaccacctctacaagcagatttccagccaatcaggagccagcaacgacaaccactactttggctacagcaccccttgggggtattttgacttcaacagattccactgccacttttcgccacgcgactggcagagactcatcaacaacaactggggattccggcccaaaagactcaacttcaagctgtttaacattcaagtcaaggaggtcacgcagaatgacggtacgacgacgattgccaataaccttaccagcacggttcaggtgtttactgacttggagtaccagctcccgtacgtcctcggctcggcgcatcaaggatgcctcccgccgttcccagcagacgtcttcatggtgccacagtatggatacctcaccctgaacaacgggagtcaggcggtaggacgctcttccttttactgcctggagtactttccttctcagatgcttcgcaccggaaacaactttaccttcagctacacttttgaagacgttcctttccacagcagctacgctcacagtcaaagtctggaccgtctcatgaatcctctcatcgaccagtacctgtattacttgagcagaacaaacactccaagcggaaccactacgcagtccaggcttcagttttctcaggccggagcgagtgacattcgggaccagtctaggaactggcttcctggaccctgttaccgccagcagcgagtatcaaagacagctgcggataacaacaacagtgaatactcgtggactggagctaccaagtaccacctcaatggcagagactctctggtgaatccgggcccggccatggccagccacaaggacgatgaagaaaagttttttcctcaaagcggggttctcatctttgggaagcaaggctcagagaaaacaaatgtggacattgaaaaggtcatgattacagacgaagaggaaatcaggaccaccaatcccgtggctacggagcagtatggttctgtatctaccaacctccagagcggcaacacacaagcagctacctcagatgtcaacacacaaggcgttcttccaggcatggtctggcaggacagagacgtgtacctgcaggggcccatctgggcaaaaattccacacacggacggacattttcacccctctcccctcatgggcggatttggacttaaacaccctcctccacagattctcattaagaataccccggtacctgcgaatccttcgaccaccttcagcgcggcaaagtttgcttccttcatcacacagtattccacggggcaggtcagcgtggagatcgagtgggagctgcagaaggagaacagcaaacgctggaatcccgaaattcagtacacttccaactacaacaaatctgttaatgtggactttactgtggacactaatggggtgtattcagagcctcgccctattggcaccagatacctgactcgtaatctgtaa

SEQ ID NO: 308 - DNA, 3159 bp, synthetic construct
  misc_feature 1..3159: note = source = /note="Description of Artificial Sequence: Synthetic polynucleotide"
  source 1..3159: mol_type = other DNA
gattgatttagcggccgcgaattcgcccttgctgcgtcaactggaccaatgagaactttcccttcaacgattgcgtcgacaagatggtgatctggtgggaggagggaaagatgaccgccaaggtcgtggagtcggccaaagccattctcggaggaagcaaggtgcgtgtggaccaaaagtgcaagtcttcggcccagatcgacccgactcccgtgatcgtcacctccaacaccaacatgtgcgccgtgattgatggaaactcaacgaccttcgagcaccagcagccgttgcaagaccggatgttcaaatttgaacttacccgccgtctggatcatgactttggaaaggtcaccaagcaggaagtgaaagactttttccggtgggcaaaggatcacgtggttgaggtggagcatgagttctacgtcaaaaagggtggagccaaaaaaagacccgcccccagtgacgcagatataagtgagcccaaacgggcgcgcgagtcagttgcgcagccatcgacgtcagacgcggaagcttcgatcaactacgcggacaggtaccaaaacaaatgttctcgtcacgtgggcatgaatctgatgctgtttccctgcagacaatgcgagagaatgaatcagaattcaaatatctgcttcactcacggacagaaagactgtccatagtgctttcccgtgtcagaatctcaacccgtttctgtcgtcaaaaaggcgtatcagaaactgtgctacattcatcacatcatgggaaaggtgccagacgcttgcactgcttgcgacctggtcaatgtggatttggatgactgcatctctgaacaataaatgatttaaatcaggtatggctgccgatggttatcttccagattggctcgaggacactctctctgaaggaataagacagtggtggaagctcaaacctggcccaccaccaccaaagcccgcagagcggcataaggacgacagcaggggtcttgtgcttcctggatacaagtacctcggacccttcaacggactcgacaagggagagccggtcaacgaggcagacgccgcggccctcgagcacgacaaggcctacgaccggcagctcgacagcggagacaacccgtacctcaagtacaaccacgccgacgcggagtttcaggagcgccttaaagaagatacgtcttttgggggcaacctcggacgagcagtcttccaggcgaaaaagagggttcttgaacctctgggcctggttgaggaacctgttaagacggctccgggaaaaaagaggccggtagagcactctcctgtggagccagactcctcctcgggaaccggaaaagcgggcaaccagcctgcaagaaaaagattgaatttcggtcagactggagacgcagactccgtacctgacccccagcctctcggacagccaccagcatccccctctggtctgggaactaatacgatggctacaggcagtggcgcaccaatggcagacaataacgagggcgccgacggagtgggtaattcctcgggaaattggcattgcgattccacatggatgggcgacagagtcgtcaccaccagcacccgcacctgggccctgcccacctacaacaaccacctctacaagcagatttccagccaatcaggagccagcaacgacaaccactactttggctacagcaccccttgggggtattttgacttcaacagattccactgccacttttcgccacgcgactggcagagactcatcaacaacaactggggattccggcccaaaagactcaacttcaagctgtttaacattcaagtcaaggaggtcacgcagaatgacggtacgacgacgattgccaataaccttaccagcacggttcaggtgtttactgacttggagtaccagctcccgtacgtcctcggctcggcgcatcaaggatgcctcccgccgttcccagcagacgtcttcatggtgccacagtatggatacctcaccctgaacaacgggagtcaggcggtaggacgctcttccttttactgcctggagtactttccttctcagatgcttcgcaccggaaacaactttaccttcagctacacttttgaagacgttcctttccacagcagctacgctcacagtcaaagtctggaccgtctcatgaatcctctcatcgaccagtacctgtattacttgagcagaacaaacactccaagcggaaccactacgcagtccaggcttcagttttctcaggccggagcgagtgacattcgggaccagtctaggaactggcttcctggaccctgttaccgccagcagcgagtatcaaagacagctgcggataacaacaacagtgaatactcgtggactggagctaccaagtaccacctcaatggcagagactctctggtgaatccgggcccggccatggccagccacaaggacgatgaagaaaagttttttcctcaaagcggggttctcatctttgggaagcaaggctcagagaaaacaaatgtggacattgaaaaggtcatgattacagacgaagaggaaatcaggaccaccaatcccgtggctacggagcagtatggttctgtatctaccaacctccagagcggcaacacacaagcagctacctcagatgtcaacacacaaggcgttcttccaggcatggtctggcaggacagagacgtgtacctgcaggggcccatctgggcaaaaattccacacacggacggacattttcacccctctcccctcatgggcggatttggacttaaacaccctcctccacagattctcattaagaataccccggtacctgcgaatccttcgaccaccttcagcgcggcaaagtttgcttccttcatcacacagtattccacggggcaggtcagcgtggagatcgagtgggagctgcagaaggagaacagcaaacgctggaatcccgaaattcagtacacttccaactacaacaaatctgttaatgtggactttactgtggacactaatggggtgtattcagagcctcgccctattggcaccagatacctgactcgtaatctgtaattgcttgttaatcaataaaccgtttaattcgtttcagttgaactttggtctctgcgaagggcgaattcgtttaaacctgcaggactagtccctttagtgagg

SEQ ID NO: 309 - protein, 735 aa, synthetic construct
  REGION 1..735: note = source = /note="Description of Artificial Sequence: Synthetic polypeptide"
MAADGYLPDWLEDTLSEGIRQWWKLKPGPPPPKPAERHKDDSRGLVLPGYKYLGPFNGLDKGEPVNEADAAALEHDKAYDRQLDSGDNPYLKYNHADAEFQERLKEDTSFGGNLGRAVFQAKKRVLEPLGLVEEPVKTAPGKKRPVEHSPVEPDSSSGTGKAGNQPARKRLNFGQTGDADSVPDPQPLGQPPASPSGLGTNTMATGSGAPMADNNEGADGVGNSSGNWHCDSTWMGDRVVTTSTRTWALPTYNNHLYKQISSQSGASNDNHYFGYSTPWGYFDFNRFHCHFSPRDWQRLINNNWGFRPKRLNFKLFNIQVKEVTQNDGTTTIANNLTSTVQVFTDLEYQLPYVLGSAHQGCLPPFPADVFMVPQYGYLTLNNGSQAVGRSSFYCLEYFPSQMLRTGNNFTFSYTFEDVPFHSSYAHSQSLDRLMNPLIDQYLYYLSRTNTPSGTTTQSRLQFSQAGASDIRDQSRNWLPGPCYRQQRVSKTAADNNNSEYSWTGATKYHLNGRDSLVNPGPAMASHKDDEEKFFPQSGVLIFGKQGSEKTNVDIEKVMITDEEEIRTTNPVATEQYGSVSTNLQSGNTQAATSDVNTQGVLPGMVWQDRDVYLQGPIWAKIPHTDGHFHPSPLMGGFGLKHPPPQILIKNTPVPANPSTTFSAAKFASFITQYSTGQVSVEIEWELQKENSKRWNPEIQYTSNYNKSVNVDFTVDTNGVYSEPRPIGTRYLTRNL

SEQ ID NO: 310 - DNA, 2205 bp, synthetic construct
  misc_feature 1..2205: note = source = /note="Description of Artificial Sequence: Synthetic polynucleotide"
  source 1..2205: mol_type = other DNA
atggctgccgatggttatcttccagattggctcgaggacactctctctgaaggaataagacagtggtggaagctcaaacctggcccaccaccaaagcccgcagagcggcataaggacgacagcaggggtcttgtgcttcctggatacaagtacctcggacccttcaacggactcgacaagggagagccggtcaacgaggcagacgccgcggccctcgagcacgacaaggcctacgaccggcagctcgacagcggagacaacccgtacctcaagtacaaccacgccgacgcggagtttcaggagcgccttaaagaagatacgtcttttgggggcaacctcggacgagcagtcttccaggcgaaaaagagggttcttgaacctctgggcctggttgaggaacctgttaagacggctccgggaaaaaagaggcccgtagagcactctcctgtggagccagactcctcctcgggaaccggaaaagcgggcaaccagcctgcaagaaaaagattgaatttcggtcagactggagacgcagactccgtacctgacccccagcctctcggacagccaccagcagccccctctggtctgggaactaatacgatggctacaggcagtggcgcaccaatggcagacaataacgagggcgccgacggagtgggtaattcctcgggagattggcattgcgattccacatggatgggcgacagagtcatcaccaccagcacccgcacctgggccctgcccacctacaacaaccacctctacaagcagatttccagccaatcaggagccagcaatgacaaccactactttggctacagcaccccttgggggtattttgacttcaacagattccactgccacttttcgccacgcgactggcagagactcatcaacaacaactggggattccggcccaaaagactcaacctcaagctgtttaacattcaagtcaaggaggtcacgcagaatgacggtacgacgacgattgccaataaccttaccagcacggttcaggtgtttactgacttggagtaccagctcccgtacgtcctcggctcggcgcatcaaggatgcctcccgccgttcccagcagacgtcttcatggtgccacagtatggatacctcaccctgaacaacgggagtcaggcggtaggacgctcttccttttactgcctggagtactttccttctcagatgcttcgtaccggaaacaactttaccttcagctacacttttgaagacgttcctttccacagcagctacgctcacagtcaaagtctggaccgtctcatgaatcctctcatcgaccagtacctgtattacttgagcagaacaaacactccaagcggaaccactacgcagtccaggcttcagttttctcaggccggagcgagtgacattcgggaccagtctaggaactggcttcctggaccctgttaccgccagcagcgagtatcaaagacagctgcggataacaacaacggtgaatactcgtggactggagctaccaagtaccacctcaatggcagagactctctggtgaatccgggcccggccatggccagccacaaggacgatgaagaaaagttttttcctcaaagcggggttctcatctttgggaagcaaggctcagagaaaacaaatgtggacattgaaaaggtcatgattacagacgaagaggaaatcaggaccaccaatcccgtggctacggagcagtatggttctgtatctaccaacctccagagcggcaacacacgagcagctacctcagatgtcaacacacaaggcgttcttccaggcatggtctggcaggacagagacgtgtacctgcaggggcccatctgggcaaaaattccacacacggacggacattttcacccctctcccctcatgggcggatttggacttaaacaccctcctccacagattctcattaagaataccccggtacctgcgaatccttcgaccaccttcagcgcggcaaagtttgcttccttcatcacacagtattccacggggcaggtcagcgtggagatcgagtgggagctgcagaaggagaacagcaaacgctggaatcccgaaattcagtacacttccaactacaacaaatctgttaatgtggactttactgtggacactaatggggtgtattcagagcctcgccctattggcaccagatacctgactcgtaatctgtaa

SEQ ID NO: 311 - DNA, 3156 bp, synthetic construct
  misc_feature 1..3156: note = source = /note="Description of Artificial Sequence: Synthetic polynucleotide"
  source 1..3156: mol_type = other DNA
cgattgaatttagcggccgcgaattcgcccttgctgcgtcaacggaccaatgagaactttcccttcaacgattgcgtcgacaagatggtgatctggtgggaggagggaaagatgaccgccaaggtcgtggagtcggccaaagccattctcggaggaagcaaggtgcgtgtggaccaaaagtgcaagtcttcggcccagatcgacccgactcccgtgatcgtcacctccaacaccaacatgtgcgccgtgattgatggaaactcaacgaccttcgagcaccagcagccgttgcaagaccggatgttcaaatttgaacttacccgccgtctggatcatgactttggaaaggtcaccaagcaggaagtgaaagactttttccggtgggcaaaggatcacgtggttgaggtggagcatgagttctacgtcaaaaagggtggagccaaaaaaagacccgcccccagtgacgcagatataagtgagcccaaacgggcgcgcgagtcagttgcgcagccatcgacgtcagacgcggaagcttcgatcaactacgcggacaggtaccaaaacaaatgttctcgtcacgtgggcatgaatctgatgctgtttccctgcagacaatgcgagcgaatgaatcagaattcaaatatctgcttcactcacggacagaaagactgtttagagtgctttcccgtgtcagaatctcaacccgtttctgtcgtcaaaaaggcgtatcagaaactgtgctacattcatcacatcatgggaaaggtgccagacgcttgcactgcttgcgacctggtcaatgtggatttggatgactgcatctctgaacaataaatgatttaaatcaggtatggctgccgatggttatcttccagattggctcgaggacactctctctgaaggaataagacagtggtggaagctcaaacctggcccaccaccaaagcccgcagagcggcataaggacgacagcaggggtcttgtgcttcctggatacaagtacctcggacccttcaacggactcgacaagggagagccggtcaacgaggcagacgccgcggccctcgagcacgacaaggcctacgaccggcagctcgacagcggagacaacccgtacctcaagtacaaccacgccgacgcggagtttcaggagcgccttaaagaagatacgtcttttgggggcaacctcggacgagcagtcttccaggcgaaaaagagggttcttgaacctctgggcctggttgaggaacctgttaagacggctccgggaaaaaagaggcccgtagagcactctcctgtggagccagactcctcctcgggaaccggaaaagcgggcaaccagcctgcaagaaaaagattgaatttcggtcagactggagacgcagactccgtacctgacccccagcctctcggacagccaccagcagccccctctggtctgggaactaatacgatggctacaggcagtggcgcaccaatggcagacaataacgagggcgccgacggagtgggtaattcctcgggagattggcattgcgattccacatggatgggcgacagagtcatcaccaccagcacccgcacctgggccctgcccacctacaacaaccacctctacaagcagatttccagccaatcaggagccagcaatgacaaccactactttggctacagcaccccttgggggtattttgacttcaacagattccactgccacttttcgccacgcgactggcagagactcatcaacaacaactggggattccggcccaaaagactcaacctcaagctgtttaacattcaagtcaaggaggtcacgcagaatgacggtacgacgacgattgccaataaccttaccagcacggttcaggtgtttactgacttggagtaccagctcccgtacgtcctcggctcggcgcatcaaggatgcctcccgccgttcccagcagacgtcttcatggtgccacagtatggatacctcaccctgaacaacgggagtcaggcggtaggacgctcttccttttactgcctggagtactttccttctcagatgcttcgtaccggaaacaactttaccttcagctacacttttgaagacgttcctttccacagcagctacgctcacagtcaaagtctggaccgtctcatgaatcctctcatcgaccagtacctgtattacttgagcagaacaaacactccaagcggaaccactacgcagtccaggcttcagttttctcaggccggagcgagtgacattcgggaccagtctaggaactggcttcctggaccctgttaccgccagcagcgagtatcaaagacagctgcggataacaacaacggtgaatactcgtggactggagctaccaagtaccacctcaatggcagagactctctggtgaatccgggcccggccatggccagccacaaggacgatgaagaaaagttttttcctcaaagcggggttctcatctttgggaagcaaggctcagagaaaacaaatgtggacattgaaaaggtcatgattacagacgaagaggaaatcaggaccaccaatcccgtggctacggagcagtatggttctgtatctaccaacctccagagcggcaacacacgagcagctacctcagatgtcaacacacaaggcgttcttccaggcatggtctggcaggacagagacgtgtacctgcaggggcccatctgggcaaaaattccacacacggacggacattttcacccctctcccctcatgggcggatttggacttaaacaccctcctccacagattctcattaagaataccccggtacctgcgaatccttcgaccaccttcagcgcggcaaagtttgcttccttcatcacacagtattccacggggcaggtcagcgtggagatcgagtgggagctgcagaaggagaacagcaaacgctggaatcccgaaattcagtacacttccaactacaacaaatctgttaatgtggactttactgtggacactaatggggtgtattcagagcctcgccctattggcaccagatacctgactcgtaatctgtaattgcttgttaatcaataaaccgtttaattcgtttcagttgaactttggtctctgcgaagggcgaattcgtttaaacctgcaggactagtccctttagtgag

SEQ ID NO: 312 - protein, 734 aa, synthetic construct
  REGION 1..734: note = source = /note="Description of Artificial Sequence: Synthetic polypeptide"
MAADGYLPDWLEDTLSEGIRQWWKLKPGPPPKPAERHKDDSRGLVLPGYKYLGPFNGLDKGEPVNEADAAALEHDKAYDRQLDSGDNPYLKYNHADAEFQERLKEDTSFGGNLGRAVFQAKKRVLEPLGLVEEPVKTAPGKKRPVEHSPVEPDSSSGTGKAGNQPARKRLNFGQTGDADSVPDPQPLGQPPAAPSGLGTNTMATGSGAPMADNNEGADGVGNSSGDWHCDSTWMGDRVITTSTRTWALPTYNNHLYKQISSQSGASNDNHYFGYSTPWGYFDFNRFHCHFSPRDWQRLINNNWGFRPKRLNLKLFNIQVKEVTQNDGTTTIANNLTSTVQVFTDLEYQLPYVLGSAHQGCLPPFPADVFMVPQYGYLTLNNGSQAVGRSSFYCLEYFPSQMLRTGNNFTFSYTFEDVPFHSSYAHSQSLDRLMNPLIDQYLYYLSRTNTPSGTTTQSRLQFSQAGASDIRDQSRNWLPGPCYRQQRVSKTAADNNNGEYSWTGATKYHLNGRDSLVNPGPAMASHKDDEEKFFPQSGVLIFGKQGSEKTNVDIEKVMITDEEEIRTTNPVATEQYGSVSTNLQSGNTRAATSDVNTQGVLPGMVWQDRDVYLQGPIWAKIPHTDGHFHPSPLMGGFGLKHPPPQILIKNTPVPANPSTTFSAAKFASFITQYSTGQVSVEIEWELQKENSKRWNPEIQYTSNYNKSVNVDFTVDTNGVYSEPRPIGTRYLTRNL

SEQ ID NO: 313 - DNA, 2208 bp, synthetic construct
  misc_feature 1..2208: note = source = /note="Description of Artificial Sequence: Synthetic polynucleotide"
  source 1..2208: mol_type = other DNA
atggctgccgatggttatcttccagattggctcgaggacactctctctgaaggaataagacagtggtggaagctcaaacctggcccaccaccaccaaagcccgcagagcggcataaggacgacagcaggggtcttgtgcttcctgggtacaagtacctcggacccttcaacggactcgacaagggagagccggtcaacgaggcagacgccgcggccctcgagcacgacaaggcctacgaccggcagctcgacagcggagacaacccgtacctcaagtacgaccacgccgacgcggagtttcaggagcgccttaaagaagatacgtcttttgggggcaacctcggacgagcagtcttccaggcaaaaaagagggttcttgaacctctgggcctggttgaggagcctgttaagacggctccgggaaaaaagaggccggtagagcactctcctgtggagccagactcctcctcgggaaccggaaaagcgggcaaccagcctgcaagaaagagattgaatttcggtcagactggagacgcagactccgtacctgacccccagcctctcggacagccaccagcagccccctctggtctgggaactaatacgatggctacaggcagtggcgcaccaatggcagacaataacgatggcgccgacggagtgggtaattcctcgggaaattggcattgcgattccacatggatgggcgacagagtcatcaccaccagcacccgaacctgggctctgcccacctacaacaaccatctgtacaagcagatttccagccaatcaggagccagcaacgacaaccactactttggctacagcaccccttgggggtattttgacttcaacagattccactgccacttttcaccacgtgactggcaaagactcatcaacaacaactggggattccggcccaagagactcaacttcaagctctttaacattcaagtcagagaggtcacgcagaatgatggtacgacgacgattgccaataaccttaccagcacggttcaggtgtttactgactcggagtaccagctcccgtacgtcctcggctcggcgcatcaaggatgcctcccgccgttcccagcagacgtcttcatggtgccacagtatggatacctcaccctgaacaacgggagtcaggcagtaggacgctcttcattttactgcctggagtacttcccttctcagatgctgcgtaccggaaacaactttaccttcagctacacctttgaggatgttcctttccacagcagctacgctcacagccagagtttggaccgtctcatgaatcctctcatcgaccagtacctgtattacttgagcagaacaaacactccaagcggaaccaccacgcagtccaggcttcagttttctcaggccggagcgagtgacattcgggatcagtctaggaactggcttcctggaccctgttaccgccagcagcgagtatcaaagacatctgcggacaacaacaacagtgaatactcgtggattggagctaccaagtaccacctcaatggcagagactctctggtgaatccgggcccggcaatggccagccacaaggacgatgaagaaaagttttttcctcagagcggggttctcatctttggaaaacaaggatcagagaaaacaaatgtggacattgaaaaggtcatgattacagacgaagaggaaatcagaaccaccaatcccgtggccacggagcagtatggttctgtatctaccaacctccagagcggcaacacacaagcatctactgcagatgtcaacacacaaggcgttcttccaggcatggtctggcaggacagagacgtgtacctgcaggggcctatctgggcaaagattccgcacacggacggacattttcacccctctcccctcatgggcggattcggacttaaacaccctcctccacagattctcatcaaaaacaccccggtacctgcgaatccttcgaccaccttcagtgcggcaaagtttgcttccttcatcacacagtattccacggggcgggtcagcgtggagatcgagtgggagctacagaaggagaacagcaaacgctggaatcccgagatccagtacacttccaactacaacaaatctgttaatgtggactttactgtggacactaatggtgtgtattcagagcctcgccccattggcaccagatacctgactcgtaatctgtaa

SEQ ID NO: 314 - protein, 735 aa, synthetic construct
  REGION 1..735: note = source = /note="Description of Artificial Sequence: Synthetic polypeptide"
MAADGYLPDWLEDTLSEGIRQWWKLKPGPPPPKPAERHKDDSRGLVLPGYKYLGPFNGLDKGEPVNEADAAALEHDKAYDRQLDSGDNPYLKYDHADAEFQERLKEDTSFGGNLGRAVFQAKKRVLEPLGLVEEPVKTAPGKKRPVEHSPVEPDSSSGTGKAGNQPARKRLNFGQTGDADSVPDPQPLGQPPAAPSGLGTNTMATGSGAPMADNNDGADGVGNSSGNWHCDSTWMGDRVITTSTRTWALPTYNNHLYKQISSQSGASNDNHYFGYSTPWGYFDFNRFHCHFSPRDWQRLINNNWGFRPKRLNFKLFNIQVREVTQNDGTTTIANNLTSTVQVFTDSEYQLPYVLGSAHQGCLPPFPADVFMVPQYGYLTLNNGSQAVGRSSFYCLEYFPSQMLRTGNNFTFSYTFEDVPFHSSYAHSQSLDRLMNPLIDQYLYYLSRTNTPSGTTTQSRLQFSQAGASDIRDQSRNWLPGPCYRQQRVSKTSADNNNSEYSWIGATKYHLNGRDSLVNPGPAMASHKDDEEKFFPQSGVLIFGKQGSEKTNVDIEKVMITDEEEIRTTNPVATEQYGSVSTNLQSGNTQASTADVNTQGVLPGMVWQDRDVYLQGPIWAKIPHTDGHFHPSPLMGGFGLKHPPPQILIKNTPVPANPSTTFSAAKFASFITQYSTGRVSVEIEWELQKENSKRWNPEIQYTSNYNKSVNVDFTVDTNGVYSEPRPIGTRYLTRNL

SEQ ID NO: 315 - DNA, 2217 bp, synthetic construct
  misc_feature 1..2217: note = source = /note="Description of Artificial Sequence: Synthetic polynucleotide"
  source 1..2217: mol_type = other DNA
atggctgccgatggttatcttccagattggctcgaggacaacctctctgagggcattcgcgagtggtgggacttgaaacctggagccccgaaacccaaagccaaccagcaaaagcaggacgacggccggggtctggtgcttcctggctacaagtacctcggacccttcaacggactcgacaagggggagcccgtcaacgcggcggacgcagcggccctcgagcacgacaaggcctacgaccagcagctcaaagcgggtgacaatccgtacctgcggtataaccacgccgacgccgagtttcaggagcgtctgcaagaagatacgtcttttgggggcaacctcgggcgagcagtcttccaggccaagaagcgggttctcgaacctctcggtctggttgaggaaggcgctaagacggctcctggaaagaagagaccggtagagccatcaccccagcgttctccagactcctctacgggcatcggcaagacaggccagcagcccgcgaaaaagagactcaactttgggcagactggcgactcagagtcagtgcccgaccctcaaccaatcggagaaccccccgcaggcccctctggtctgggatctggtacaatggctgcaggcggtggcgctccaatggcagacaataacgaaggcgccgacggagtgggtagttcctcaggaaattggcattgcgattccgcatggctgggcgacagagtcatcaccaccagcacccgaccctgggccctccccacctacaacaaccacctctacaagcaaatctccaacgggacatcgggaggaagcaccaacgacaacacctacttcggctacagcaccccctgggggtattttgactttaacagattccactgccacttctcaccacgtgactggcagcgactcatcaacaacaactggggattccggcccaagagactcaacttcaagctcttcaacatccaggtcaaggaggtcacgcagaatgaaggcaccaagaccatcgccaataaccttaccagcacgattcaggtctttacggactcggaataccagctcccgtacgtcctcggctctgcgcaccagggctgcccgcctccgttcccggcggacgtcttcatgattcctcagtacgggtacctgactctgaacaacggcagtcaggccgtgggccgttcctccttctactgcctggagtactttccttctcaaatgcggagaacgggcaacaactttgagttcagctaccagtttgaggacgtgccttttcacagcagctacgcgcatagccaaagcctggaccggctgatgaaccccctcatcgaccagtacctgtactacctgtctcggactcagtccacgggaggtaccgcaggaactcagcagttgctattttctcaggccgggcctaataacatgtcggctcaggccaaaaactggctacccgggccctgctaccggcagcaacgcgtctccacgacactgtcgcaaaataacaacagcaactttgcttggaccggtgccaccaagtatcatctgaatggcagagactctctggtaaatcccggtgtcgctatggcaacgcacaaggacgacgaagagcgattttttccatccagcggagtcttgatgtttgggaaacagggagctggaaaagacaacgtggactatagcagcgttatgctaaccagtgaggaagaaatcaaaaccaccaacccagtggccacagaacagtacggcgtggtggccgataacctgcaacagcaaaacgccgctcctattgtaggggccgtcaacagtcaaggagccttacctggcatggtctggcagaaccgggacgtgtacctgcagggtcctatctgggccaagattcctcacacggacggcaactttcatccttcgccgctgatgggaggctttggactgaaacacccgcctcctcagatcctgattaagaatacacctgttcccgcggatcctccaactaccttcagtcaagccaagctggcgtcgttcatcacgcagtacagcaccggacaggtcagcgtggaaattgaatgggagctgcagaaagagaacagcaagcgctggaacccagagattcagtatacttccaactactacaaatctacaaatgtggactttgctgtcaatactgagggtacttattcagagcctcgccccattggcacccgttacctcacccgtaacctgtaa

SEQ ID NO: 316 - protein, 738 aa, synthetic construct
  REGION 1..738: note = source = /note="Description of Artificial Sequence: Synthetic polypeptide"
MAADGYLPDWLEDNLSEGIREWWDLKPGAPKPKANQQKQDDGRGLVLPGYKYLGPFNGLDKGEPVNAADAAALEHDKAYDQQLKAGDNPYLRYNHADAEFQERLQEDTSFGGNLGRAVFQAKKRVLEPLGLVEEGAKTAPGKKRPVEPSPQRSPDSSTGIGKTGQQPAKKRLNFGQTGDSESVPDPQPIGEPPAGPSGLGSGTMAAGGGAPMADNNEGADGVGSSSGNWHCDSAWLGDRVITTSTRPWALPTYNNHLYKQISNGTSGGSTNDNTYFGYSTPWGYFDFNRFHCHFSPRDWQRLINNNWGFRPKRLNFKLFNIQVKEVTQNEGTKTIANNLTSTIQVFTDSEYQLPYVLGSAHQGCPPPFPADVFMIPQYGYLTLNNGSQAVGRSSFYCLEYFPSQMRRTGNNFEFSYQFEDVPFHSSYAHSQSLDRLMNPLIDQYLYYLSRTQSTGGTAGTQQLLFSQAGPNNMSAQAKNWLPGPCYRQQRVSTTLSQNNNSNFAWTGATKYHLNGRDSLVNPGVAMATHKDDEERFFPSSGVLMFGKQGAGKDNVDYSSVMLTSEEEIKTTNPVATEQYGVVADNLQQQNAAPIVGAVNSQGALPGMVWQNRDVYLQGPIWAKIPHTDGNFHPSPLMGGFGLKHPPPQILIKNTPVPADPPTTFSQAKLASFITQYSTGQVSVEIEWELQKENSKRWNPEIQYTSNYYKSTNVDFAVNTEGTYSEPRPIGTRYLTRNL

SEQ ID NO: 317 - protein, 735 aa, synthetic construct
  REGION 1..735: note = source = /note="Description of Artificial Sequence: Synthetic polypeptide"
MAADGYLPDWLEDTLSEGIRQWWKLKPGPPPPKPAERHKDDSRGLVLPGYKYLGPFNGLDKGEPVNEADAAALEHDKAYDRQLDSGDNPYLKYNHADAEFQERLKEDTSFGGNLGRAVFQAKKRVLEPLGLVEEPVKTAPGKKRPVEHSPVEPDSSSGTGKAGQQPARKRLNFGQTGDADSVPDPQPLGQPPAAPSGLGSTTMATGSGAPMADNNEGADGVGNSSGNWHCDSQWLGDRVITTSTRTWALPTYNNHLYKQISSQSGASNDNHYFGYSTPWGYFDFNRFHCHFSPRDWQRLINNNWGFRPKRLNFKLFNIQVKEVTQNDGTTTIANNLTSTVQVFTDSEYQLPYVLGSAHQGCLPPFPADVFMVPQYGYLTLNNGSQAVGRSSFYCLEYFPSQMLRTGNNFQFSYTFEDVPFHSSYAHSQSLDRLMNPLVDQYLYYLNKTQTNSGTLQQSRLLFSQAGPTNMSLQAKNWLPGPCYRQQRLSKQANDNNNSNFPWTAATKYHLNGRDSLVNPGPAMASHKDDEEKFFPMHGTLIFGKQGTNANDADLENVMITDEEEIRTTNPVATEQYGTVSNNLQNSNTGPTTGTVNHQGALPGMVWQDRDVYLQGPIWAKIPHTDGHFHPSPLMGGFGLKHPPPQIMIKNTPVPANPPTNFSSAKFASFITQYSTGQVSVEIEWELQKENSKRWNPEIQYTSNYNKSVNVDFTVDTNGVYSEPRPIGTRYLTRNL

SEQ ID NO: 318 - DNA, 3158 bp, synthetic construct
  misc_feature 1..3158: note = source = /note="Description of Artificial Sequence: Synthetic polynucleotide"
  source 1..3158: mol_type = other DNA
gattgaatttagcggccgcgaattcgcccttgctgcgtcaactggaccaatgagaactttcctttcaatgattgcgtcgacaagatggtgatctggtgggaggagggaaagatgaccgccaaggtcgtggagtcggccaaagccattctcggaggaagcaaggtgcgcgcggaccagaaatgcaagtcctcggcccagatagacccgactcccgtgattgtcacctccaacaccaacatgtgcgccgtgattgacgggaactcaacgaccttcgaacaccagcagccgttgcaagaccggatgttcaaatttgaactcacccgccgtctggatcatgactttgggaaggtcaccaagcaggaagtcaaagactttttccggtgggcaaaggatcacgtggttgaggtggagcatgaattctacgtcaaaaagggtggagctaagaaaagacccgcccccagtgacgcagatataagtgagcccaaacgggcgcgcgagtcagttgcgcagccatcgacgtcagacgcggaagcttcgatcaactacgcgggcaggtaccaaaacaaatgttctcgtcacgtgggcatgaatctgatgctgtttccctgcagacaatgcgagagaatgaatcagaattcaaatatctgcttcactcacggacagaaagactgtttagagtgctttcccgtgtcagaatctcaacccgtttctgtcgtcaaaaaggcgtatcagaaactttgctacattcatcatatcatgggaaaggtgccagacgcttgcactgcctgcgatctggtcaatgtggatttggatgactgcatctctgaacaataaatgatttaaatcaggtatggctgccgatggttatcttccagattggctcgaggacactctctctgaaggaataagacagtggtggaagctcaaacctggcccaccaccaccaaagcccgcagagcggcataaggacgacagcaggggtcttgtgcttcctgggtacaagtacctcggacccttcaacggactcgacaagggggagccggtcaacgaggcagacgccgcggccctcgagcacgacaaggcctacgaccggcagctcgacagcggagacaacccgtacctcaagtacaaccacgccgacgcggagtttcaggagcgccttaaagaagatacgtcttttgggggcaacctcggacgagcagtcttccaggcaaaaaagagggttcttgaacctctgggcctggttgaggaacctgttaaaacggctccgggaaaaaagaggccggtagagcactctcctgtggagccagactcctcctcgggaaccggaaaagcgggccagcagcctgcaagaaaaagattgaatttcggtcagactggagacgcagactccgtacctgacccccagcctctcggacagccaccagcagccccctctggtctgggatctactacaatggctacaggcagtggcgcaccaatggcagacaataacgagggtgccgatggagtgggtaattcctcgggaaattggcattgcgattcccaatggctgggcgacagagtcatcaccaccagcacccgcacctgggccctgcccacctacaacaaccacctctacaagcaaatctccagccaatcaggagcctcaaacgacaaccactactttggctacagcaccccctgggggtattttgacttcaacagattccactgccacttttcaccacgtgactggcaaagactcatcaacaacaactggggattccgacccaagagactcaacttcaagctctttaacattcaagtcaaagaggtcacgcagaatgacggtacgacgacgattgccaataaccttaccagcacggttcaggtgtttactgactcggagtaccagctcccgtacgtcctcggctcggcgcatcaaggatgcctcccgccgtttccagcggacgtcttcatggtcccacagtatggatacctcaccctgaacaacgggagtcaggcagtaggacgctcttcattttactgcctggagtactttccttctcagatgctgcgtaccggaaacaactttcaattcagctacacttttgaagacgtgcctttccacagcagctacgctcacagccagagtctggatcggctgatgaatcctctggtcgaccagtacctgtattatctgaacaagacacaaacaaatagtggaactcttcagcagtctcggctactgtttagccaagctggacccaccaacatgtctcttcaagctaaaaactggctgcctggaccttgctacagacagcagcgtctgtcaaagcaggcaaacgacaacaacaacagcaactttccctggactgcagctacaaagtatcatctaaatggccgggactcgttggttaatccaggaccagctatggccagtcacaaggatgacgaagaaaagtttttccccatgcatggaacccttatatttggtaaacaaggaacaaatgccaacgacgcggatttggaaaatgtcatgattacagatgaagaagaaatcaggaccaccaatcccgtggctacggagcagtacggaactgtatcaaataatttgcaaaactcaaacactggtccaactactggaactgtcaatcaccaaggagcgttacctggtatggtgtggcaggatcgagacgtgtacctgcagggacccatttgggccaagattcctcacaccgatggacactttcatccttctccactgatgggaggttttggactcaaacacccacctcctcaaatcatgatcaaaaacactcccgttccagccaatcctcccacaaacttcagttctgccaagtttgcttctttcatcacacagtattccacggggcaggtcagcgtggagatcgagtgggagctgcagaaggagaacagcaaacgctggaatcccgaaattcagtacacttccaactacaacaaatctgttaatgtggactttactgtggacactaatggtgtgtattcagagcctcgccccattggcaccagatacctgactcgtaatctgtaattgcttgttaatcaataaaccgtttaattcgtttcagttgaactttggtctctgcgaagggcgaattcgtttaaacctgcaggactagtccctttagtga

SEQ ID NO: 319 - protein, 735 aa, synthetic construct
  REGION 1..735: note = source = /note="Description of Artificial Sequence: Synthetic polypeptide"
MAADGYLPDWLEDTLSEGIRQWWKLKPGPPPPKPAERHKDDSRGLVLPGYKYLGPFNGLDKGEPVNEADAAALEHDKAYDRQLDSGDNPYLKYNHADAEFQERLKEDTSFGGNLGRAVFQAKKRVLEPLGLVEEPVKTAPGKKRPVEHPPVEPDSSSGTGKAGQQPARKRLNFGQTGDADSVPDPQPLGQPPAAPSGLGSTTMATGSGAPMADNNEGADGVGNSSGNWHCDSQWLGDRVITTSTRTWALPTYNNHLYKQISSQSGASNDNHYFGYSTPWGYFDFNRFHCHFSPRDWQRLINNNWGFRPKRLNFKLFNIQVKEVTQNDGTTTIANNLTSTVQVFTDSEYQLPYVLGSAHQGCLPPFPADVFMVPQYGYLTLNNGSQAVGRSSFYCLEYFPSQMLRTGNNFQFSYTFEDVPFHSSYAHSQSLDRLMNPLIDQYLYYLNKTQTNSGTLQQSRLLFSQAGPTNMSLQAKNRLPGPCYRQQRLSKQANDNNNSNFPWTAATKYHLNGRDSLVNPGPAMASHKDDEEKFFPMHGTLIFGKQGTNANDADLENVMITDEEEIRTTNPVATEQYGTVSNNLQNSNTGPTTGTVNHQGALPGMVWQDRDVYLQGPIWAKIPHTDGHFHPSPLVGGFGLKHPPPQIMIKNTPVPANPPTNFSSAKFASFITQYSTGQVSVEIEWELQKENSKRWNPEIQYTSNYNKSVNVDFTVDTNGVYSEPRPIGTRYLTRNL

SEQ ID NO: 320 - DNA, 3159 bp, synthetic construct
  misc_feature 1..3159: note = source = /note="Description of Artificial Sequence: Synthetic polynucleotide"
  source 1..3159: mol_type = other DNA
gattgaatttagcggccgcgaattcgcccttgctgcgtcaactggaccaatgagaactttcctttcaatgattgcgtcgacaagatggtgatctggtgggaggagggaaagatgaccgccaaggtcgtggagtcggccaaagccattctcggaggaagcaaggtgcgcgtggaccagaaatgcaagtcctcggcccagatagacccgactcccgtgattgtcacctccaacaccgacatgtgcgccgtgattgacgggaactcaacgaccttcgaacaccagcagccgttgcaagaccggatgttcaaatttgaactcacccgccgtctggatcatgactttgggaaggtcaccaagcaggaagtcaaagactttttccggtgggcaaaggatcacgtggttgaggtggagcatgaattctacgtcaaaaagggtggagctaagaaaagacccgcccccagtgacgcagatataagtgagcccaaacgggcgcgcgagtcagttgcgcagccatcgacgtcagacgcggaagcttcgatcaactacgcggacaggtaccaaaacaaatgttctcgtcacgtgggcatgaatctgatgctgtttccctgcagacaatgcgagagaatgaatcagaattcaaatatctgcttcactcacggacagaaagactgtttagagtgctttcccgtgtcagaatctcaacccgtttctgtcgtcaaaaaggcgtatcagaaactttgctacattcatcatatcatgggaaaggtgccagacgcttgcactgcctgcgatctggtcaatgtggatttggatgactgcatctctgaacaataaatgatttaaatcaggtatggctgccgatggttatcttccagattggctcgaggacactctctctgaaggaataagacagtggtggaagctcaaacctggcccaccaccaccaaagcccgcagagcggcataaggacgacagcaggggtcttgtgcttcctgggtacaagtacctcggacccttcaacggactcgacaagggggagccggtcaacgaggcagacgccgcggccctcgagcacgacaaggcctacgaccggcagctcgacagcggagacaacccgtacctcaagtacaaccacgccgacgcggagtttcaggagcgccttaaagaagatacgtcttttgggggcaacctcggacgagcagtcttccaggcaaaaaagagggttcttgaacctctgggcctggttgaggaacctgttaaaacggctccgggaaaaaagaggccggtagagcaccctcctgtggagccagactcctcctcgggaaccggaaaagcgggccagcagcctgcaagaaaaagattgaatttcggtcagactggagacgcagactccgtacctgacccccagcctctcggacagccaccagcagccccctctggtctgggatctactacaatggctacaggcagtggcgcaccaatggcagacaataacgagggtgccgatggagtgggtaattcctcgggaaattggcattgcgattcccaatggctgggcgacagagtcatcaccaccagcacccgcacctgggccctgcccacctacaacaaccacctctacaagcaaatctccagccaatcaggagcctcaaacgacaaccactactttggctacagcaccccctgggggtattttgacttcaacagattccactgccacttttcaccacgtgactggcaaagactcatcaacaacaactggggattccgacccaagagactcaacttcaagctctttaacattcaagtcaaagaggtcacgcagaatgacggtacgacgacgattgccaataaccttaccagcacggttcaggtgtttactgactcggagtaccagctcccgtacgtcctcggctcggcgcatcaaggatgcctcccgccgtttccagcggacgtcttcatggtcccacagtatggatacctcaccctgaacaacgggagtcaggcagtaggacgctcttcattttactgcctggagtactttccttctcagatgctgcgtaccggaaacaactttcagttcagctacacttttgaagacgtgcctttccacagcagctacgctcacagccagagtctggatcggctgatgaatcctctgatcgaccagtacctgtattatctgaacaagacacaaacaaatagtggaactcttcagcagtctcggctactgtttagccaagctggacccaccaacatgtctcttcaagctaaaaaccggctgcctggaccttgctacagacagcagcgtctgtcaaagcaggcaaacgacaacaacaacagcaactttccctggaccgcagctacaaagtatcatctaaatggccgggactcgttggttaatccaggaccagctatggccagtcacaaggatgacgaagaaaagtttttccccatgcatggaacccttatatttggtaaacaaggaacaaatgccaacgacgcggatttggaaaatgtcatgattacagatgaagaagaaatcaggaccaccaatcccgtggctacggagcagtacggaactgtatcaaataatttgcaaaactcaaacactggtccaactactggaactgtcaatcaccaaggagcgttacctggtatggtgtggcaggatcgagacgtgtacctgcagggacccatttgggccaagattcctcacaccgatggacactttcatccttctccactggtgggaggttttggactcaaacacccacctcctcaaatcatgatcaaaaacactcccgttccagccaatcctcccacaaacttcagttctgccaagtttgcttctttcatcacacagtattccacggggcaggtcagcgtggagatcgagtgggagctgcagaaggagaacagcaaacgctggaatcccgaaattcagtacacttccaactacaacaaatctgttaatgtggactttactgtggacactaatggtgtgtattcagagcctcgccccattggcaccagatacctgactcgtaatctgtaattgcttgttaatcaataaaccgtttaattcgtttcagttgaactttggtctctgcgaagggcgaattcgtttaaacctgcaggactagtccctttagtgag

SEQ ID NO: 321 - DNA, 2208 bp, synthetic construct
  misc_feature 1..2208: note = source = /note="Description of Artificial Sequence: Synthetic polynucleotide"
  source 1..2208: mol_type = other DNA
atggctgccgatggttatcttccagattggctcgaggacactctctctgaaggaataagacagtggtggaagctcaaacctggcccaccaccaccaaagcccgcagagcggcataaggacgacagcaggggtcttgtgcttcctgggtacaagtaccttggacccttcaacggactcgacaagggagagccggtcaacgaggcagacgccgcggccctcgagcacgacaaggcctacgaccggcagctcgacagcggagacaacccgtaccccaagtacaaccacgccgacgcggagttccaggagcgtcttaaagaagatacgtcttttgggggcaacctcggacgagcagtcttccaggcgaaaaagagggttcttgaacctctgggcctggttgaggaacctgttaagacggctccgggaaaaaagaggccggtagagcactctcctgcggagccagactcctcctcgggaaccggaaaagcgggccagcagcctgcaagaaagagattgaatttcggtcagactggagacgcagactccgtacctgacccccagcctctcggacagccaccagcagccccctctggtctgggaactaatacgatggctacaggcagtggcgcaccaatggcagacaataacgagggcgccgacggagtgggtaattcctcgggaaattggcattgcgattccacatggatgggcgacagagtcatcaccaccagcacccgcacctgggctctgcccacctacaacaaccacctctacaagcagatttccagccaatcaggagcctcaaacgacaaccactactttggctacagcaccccttgggggtattttgacttcaacagattccactgccacttttcgccacgtgactggcaaagactcatcaacaacaattggggattccggcccaaaagactcaacttcaagctctttaacattcaagtcaaggaggtcacgcagaatgacggtacgacgacgattgccaataaccttaccagcacggttcaggtgtttactgactcggagtaccagctcccgtacgtcctcggctcggcgcatcaaggatgcctcccgccgttcccagcagacgtcttcatggtgccacagtatggatacctcaccctgaacaacgggagtcaggcagtaggacgctcttcattttactgcctggagtactttccttctcagatgctgcgtaccggaaacaactttaccttcagctacacctttgaggacgttcctttccacagcagctacgcccacagccagagtttggaccgtctcatgaatcctctcatcgaccagtacctgtattacttgagcagaacaaacactccaagcggaaccaccacgcagtcaaggcttcagttttctcaggccggagcaagtgacattcgggaccagtctaggaactggcttcctggaccctgttaccgccagcagcgagtatcaaagacatctgcggataacaacaacagtgaatactcgtggactggagctaccaagtaccaccttaatggaagagactctctggtgaatccgggcccggccatggccagccacaaggacgatgaagaaaagttttttcctcagagcggggttctcatctttggaaaacaagactcgggaaaaactaatgtggacattgaaaaggtcatgattacagacgaagaggaaatcaggaccaccaatcccgtggctacggagcagtatggttctgtatctaccaacctccagagcggcaacacacaagcagctacctcagatgtcaacacacaaggcgttcttccaggcatggtgtggcaggacagagacgtgtacctgcaggggcccatctgggcaaagattccacacacggacggacattttcacccctctcccctcatgggcggattcggacttaaacaccctcccccgcagattctcatcaagaacaccccggtacctgcgaatccttcgactaccttcagtgcggcaaagtttgcttccttcattacacagtactccacggggcaggtcagcgtggagatcgagtgggagctgcagaaggagaacagcaaacgctggaatcccgagattcagtacacttccaactacaacaaatctgttaatgtggactttactgtggacactaatggtgtgtattcagagcctcgccccattggcaccaggtacctgactcgtaatctgtaa

SEQ ID NO: 322 - protein, 735 aa, synthetic construct
  REGION 1..735: note = source = /note="Description of Artificial Sequence: Synthetic polypeptide"
MAADGYLPDWLEDTLSEGIRQWWKLKPGPPPPKPAERHKDDSRGLVLPGYKYLGPFNGLDKGEPVNEADAAALEHDKAYDRQLDSGDNPYPKYNHADAEFQERLKEDTSFGGNLGRAVFQAKKRVLEPLGLVEEPVKTAPGKKRPVEHSPAEPDSSSGTGKAGQQPARKRLNFGQTGDADSVPDPQPLGQPPAAPSGLGTNTMATGSGAPMADNNEGADGVGNSSGNWHCDSTWMGDRVITTSTRTWALPTYNNHLYKQISSQSGASNDNHYFGYSTPWGYFDFNRFHCHFSPRDWQRLINNNWGFRPKRLNFKLFNIQVKEVTQNDGTTTIANNLTSTVQVFTDSEYQLPYVLGSAHQGCLPPFPADVFMVPQYGYLTLNNGSQAVGRSSFYCLEYFPSQMLRTGNNFTFSYTFEDVPFHSSYAHSQSLDRLMNPLIDQYLYYLSRTNTPSGTTTQSRLQFSQAGASDIRDQSRNWLPGPCYRQQRVSKTSADNNNSEYSWTGATKYHLNGRDSLVNPGPAMASHKDDEEKFFPQSGVLIFGKQDSGKTNVDIEKVMITDEEEIRTTNPVATEQYGSVSTNLQSGNTQAATSDVNTQGVLPGMVWQDRDVYLQGPIWAKIPHTDGHFHPSPLMGGFGLKHPPPQILIKNTPVPANPSTTFSAAKFASFITQYSTGQVSVEIEWELQKENSKRWNPEIQYTSNYNKSVNVDFTVDTNGVYSEPRPIGTRYLTRNL

SEQ ID NO: 323 - DNA, 2208 bp, synthetic construct
  misc_feature 1..2208: note = source = /note="Description of Artificial Sequence: Synthetic polynucleotide"
  source 1..2208: mol_type = other DNA
atggctgccgatggttatcttccagattggctcgaggacactctctctgaaggaataagacagtggtggaagctcaaacctggcccaccaccaccaaagcccgcagagcggcataaggacgacagcaggggtcttgtgcttcctgggtacaagtaccttggacccttcaacggactcgacaagggagagccggtcaacgaggcagacgccgcggccctcgagcacgacaaggcctacgaccggcagctcgacggcggagacaacccgtacctcaagtacaaccacgccgacgcggagttccaggagcgtcttaaagaagatacgtcttttgggggcaacctcggacgagcagtcttccaggcgaaaaagagggttcttgaacctctgggcctggttgaggaacctgttaagacggctccgggaaaaaagaggccggtagagcactctcttgcggagccagactcctcctcgggaaccggaaaagcgggccagcagcctgcaagaaggagattgaatttcggtcagactggagacgcagactccgtacctgacccccagcctctcggacagccaccagcagccccctctggtctgggaactaatacgatggctacaggcagtggcgcaccaatggcagacaataacgagggcgccgacggagtgggtaattcctcgggaaattggcattgcgattccacatggatgggcgacagagtcatcaccaccagcacccgcacctgggctctgcccacctacaacaaccacctctacaggcagatttccagccaatcaggagcctcaaacgacaaccactactttggctacagcaccccttgggggtattttgacttcaacagattccactgccacttttcgccacgtgactggcaaagactcatcaacaacaattggggatcccggcccaaaagactcaacttcaagctctttaacattcaagtcaaggaggtcacgcagaatgacggtacgacgacgattgccaataaccttaccagcacggttcaggtgtttactgactcggagtaccagctcccgtacgtcctcggctcggcgcatcaaggatgcctcccgccgttcccagcagacgtcttcatggtgccacagtatggatacctcaccctgaacaacgggagtcaggcagtaggacgctcttcattttactgcctggagtactttccttctcagatgctgcgtaccggaaacaactttaccttcagctacacctttgaggacgttcctttccacagcagctacgcccacagccagagtttggaccgtctcatgaatcctctcgtcgaccagtacctgtattacttgagcagaacaaacactccaagcggaaccaccacgcagtcaaggcttcagttttctcaggccggagcaagtgacattcgggaccagtctaggaactggcttcctggaccctgttaccgccagcagcgagtatcaaagacatctgcggataacaacaacagtgaatactcgtggactggagctaccaagtaccaccttaatggaagagactctctggtgaatccgggcccggccatggccagccacaaggacgatgaagaaaagttttttcctcagagcggggttctcatctttggaaaacaagactcgggaaaaactaatgtggacattgaaaaggtcatgattacagacgaagaggaaatcaggaccaccaatcccgtggctacggagcagtatggttctgtatctaccaacctccagagcggcaacacacaagcagctacctcagatgtcaacacacaaggcgttcttccaggcatggtgtggcaggacagagacgtgtacctgcaggggcccatctgggcaaagattccacacacggacggacattttcacccctctcccctcatgggcggattcggacttaaacaccctcccccgcagattctcatcaagaacaccccggtacctgcgaatccttcgactaccttcagtgcggcaaagtttgcttccttcattacacagtactccacggggcaggtcagcgtggagatcgagtgggagctgcagaaggagaacagcaaacgctggaatcccgagattcagtacacttccaactacaacaaatctgttaatgtggactttactgtggacactaatggtgtgtattcagagcctcgccccattggcaccagatacctgactcgtaatctgtaa

SEQ ID NO: 324 - protein, 735 aa, synthetic construct
  REGION 1..735: note = source = /note="Description of Artificial Sequence: Synthetic polypeptide"
MAADGYLPDWLEDTLSEGIRQWWKLKPGPPPPKPAERHKDDSRGLVLPGYKYLGPFNGLDKGEPVNEADAAALEHDKAYDRQLDGGDNPYLKYNHADAEFQERLKEDTSFGGNLGRAVFQAKKRVLEPLGLVEEPVKTAPGKKRPVEHSLAEPDSSSGTGKAGQQPARRRLNFGQTGDADSVPDPQPLGQPPAAPSGLGTNTMATGSGAPMADNNEGADGVGNSSGNWHCDSTWMGDRVITTSTRTWALPTYNNHLYRQISSQSGASNDNHYFGYSTPWGYFDFNRFHCHFSPRDWQRLINNNWGSRPKRLNFKLFNIQVKEVTQNDGTTTIANNLTSTVQVFTDSEYQLPYVLGSAHQGCLPPFPADVFMVPQYGYLTLNNGSQAVGRSSFYCLEYFPSQMLRTGNNFTFSYTFEDVPFHSSYAHSQSLDRLMNPLVDQYLYYLSRTNTPSGTTTQSRLQFSQAGASDIRDQSRNWLPGPCYRQQRVSKTSADNNNSEYSWTGATKYHLNGRDSLVNPGPAMASHKDDEEKFFPQSGVLIFGKQDSGKTNVDIEKVMITDEEEIRTTNPVATEQYGSVSTNLQSGNTQAATSDVNTQGVLPGMVWQDRDVYLQGPIWAKIPHTDGHFHPSPLMGGFGLKHPPPQILIKNTPVPANPSTTFSAAKFASFITQYSTGQVSVEIEWELQKENSKRWNPEIQYTSNYNKSVNVDFTVDTNGVYSEPRPIGTRYLTRNL

SEQ ID NO: 325 - protein, 738 aa, synthetic construct
  REGION 1..738: note = source = /note="Description of Artificial Sequence: Synthetic polypeptide"
MAADGYLPDWLEDNLSEGIREWWDLKPGAPKPKANQQKQDDGRGLVLPGYKYLGPFNGLDKGEPVNAADAAALEHDKAYDQQLKAGDNPYLRYNHADAEFQERLQEDTSFGGNLGRAVFQAKKRVLEPLGLVEEAAKTAPGKKRPVEPSPQRSPDSSAGIGKKGQQPAKKRLNFGQTGDSESVPDPQPIGEPPAGPSGLGSGTMAAGGGAPMADNNEGADGVGSSSGNWHCDSTWLGDRVITTSTRTWALPTYNNHLYKQISNGTSGGSTNDNTYFGYSTPWGYFDFNRFHCHFSPRDWQRLINNNWGFRPKRLSFKLFNIQVKEVTQNEGTETIANNLTSTIQVFTDSEYQLPYVLGSAHQGCLPPFPADVFMIPQYGYLTLNNGSQAVGRSSFYCLEYFPSQMLRTGNNFEFSYTFEDVPFHSSCAHSQSSDRLMNPLIDQYLYYLSRTRSTGGTQGTQQLLFSQAGPANMSAQAKNWLPGPCYRQQRVSTTLSQNNNSNFAWTGATKYHLNGRDSLVNPGVAMATHKDDEERFFPSSGVLMFGKQGAGRDNVDYSSVMLTSEEEIKTTNPVATEQYGVVADNLQQTNTGPIVGNVNSQGALPGMVWQNRDVYLQGPIWAKIPHTDGNFHPSPLMGGFGLKHPPPQILIKNTPVPADPPTTFSQAKLASFITQYSTGQVSVEIEWELQKENSKRWNPEIQYTSNYYKSTNVDFAVNTEGTYSEPRPIGTRYLTRNL

SEQ ID NO: 326 - DNA, 2217 bp, synthetic construct
  misc_feature 1..2217: note = source = /note="Description of Artificial Sequence: Synthetic polynucleotide"
  source 1..2217: mol_type = other DNA
atggctgctgacggttatcttccagattggctcgaggacaacctctctgagggcattcgcgagtggtgggacctgaaacctggagcccccaagcccaaggccaaccagcagaagcaggacgacggccggggtctggtgcttcttggctacaagtacctcggacccttcaacggactcgacaagggggagcccgtcaatgcggcggacgcagcggccctcgagcacgacaaggcctacgaccagcagctcaaagcgggtgacaatccgtacctgcggtataaccacgccgacgccgagtttcaggagcgtctgcaagaagatacgtcttttgggggcaacctcgggcgagcagtcttccaggccaagaagcgggttctcgaacctctcggtctggttgaggaagctgctaagacggctcctggaaagaagagaccggtagaaccgtcacctcagcgttcccccgactcctccacgggcatcggcaagaaaggccagcagcccgctaaaaagagactgaactttggtcagactggcgactcagagtcagtccccgaccctcaaccaatcggagaaccaccagcaggcccctctggtctgggatctggtacaatggctgcaggcggtggcgctccaatggcagacaataacgaaggcgccgacggagtgggtagttcctcaggaaattggcattgcgattccacatggctgggcgacagagtcatcaccaccagcacccgaacctgggccctgcccacctacaacaaccacctctacaagcaaatatccaatgggacatcgggaggaagcaccaacgacaacacctacttcggctacagcaccccctgggggtattttgacttcaacagattccactgccacttctcaccacgtgactggcagcgactcatcaacaacaactggggattccggccaaaaagactcagcttcaagctcttcaacatccaggtcaaggaggtcacgcagaatgaaggcaccaagaccatcgccaataaccttaccagcacgattcaggtatttacggactcggaataccagctgccgtacgtcctcggctccgcgcaccagggctgcctgcctccgttcccggcggacgtcttcatgattccccagtacggctaccttacactgaacaatggaagtcaagccgtaggccgttcctccttctactgcctggaatattttccatctcaaatgctgcgaactggaaacaattttgaattcagctacaccttcgaggacgtgcctttccacagcggctacgcacacagccagagcttggaccgactgatgaatcctctcatcgaccagtacctgtactacttatccagaactcagtccacaggaggaactcaaggtacccagcaattgttattttctcaagctgggcctgcaaacatgtcggctcaggctaagaactggctacctggaccttgctaccggcagcagcgagtctctacgacactgtcgcaaaacaacaacagcaactttgcttggactggtgccaccaaatatcacctgaacggaagagactctttggtaaatcccggtgtcgccatggcaacccacaaggacgacgaggaacgcttcttcccgtcgagtggagtcctgatgtttggaaaacagggtgctggaagagacaatgtggactacagcagcgttatgctaaccagcgaagaagaaattaaaaccactaaccctgtagccacagaacaatacggtgtggtggctgacaacttgcagcaaaccaatacagggcctattgtgggaaatgtcaacagccaaggagccttacctggcatggtctggcagaaccgagacgtgtacctgcagggtcccatctgggccaagattcctcacacggacggcaacttccacccttcaccgctaatgggaggatttggactgaagcacccacctcctcagatcctgatcaagaacacgccggtacctgcggatcctccaacgacgttcagccaggcgaaattggcttccttcattacgcagtacagcaccggacaggtcagcgtggaaatcgagtgggagctgcagaaggagaacagcaaacgctggaacccagagattcagtacacttcaaactactacaaatctacaaatgtggactttgctgtcaatacagagggaacttattctgagcctcgccccattggtactcgttacctcacccgtaatctgtaa

SEQ ID NO: 327 - protein, 738 aa, synthetic construct
  REGION 1..738: note = source = /note="Description of Artificial Sequence: Synthetic polypeptide"
MAADGYLPDWLEDNLSEGIREWWDLKPGAPKPKANQQKQDDGRGLVLLGYKYLGPFNGLDKGEPVNAADAAALEHDKAYDQQLKAGDNPYLRYNHADAEFQERLQEDTSFGGNLGRAVFQAKKRVLEPLGLVEEAAKTAPGKKRPVEPSPQRSPDSSTGIGKKGQQPAKKRLNFGQTGDSESVPDPQPIGEPPAGPSGLGSGTMAAGGGAPMADNNEGADGVGSSSGNWHCDSTWLGDRVITTSTRTWALPTYNNHLYKQISNGTSGGSTNDNTYFGYSTPWGYFDFNRFHCHFSPRDWQRLINNNWGFRPKRLSFKLFNIQVKEVTQNEGTKTIANNLTSTIQVFTDSEYQLPYVLGSAHQGCLPPFPADVFMIPQYGYLTLNNGSQAVGRSSFYCLEYFPSQMLRTGNNFEFSYTFEDVPFHSGYAHSQSLDRLMNPLIDQYLYYLSRTQSTGGTQGTQQLLFSQAGPANMSAQAKNWLPGPCYRQQRVSTTLSQNNNSNFAWTGATKYHLNGRDSLVNPGVAMATHKDDEERFFPSSGVLMFGKQGAGRDNVDYSSVMLTSEEEIKTTNPVATEQYGVVADNLQQTNTGPIVGNVNSQGALPGMVWQNRDVYLQGPIWAKIPHTDGNFHPSPLMGGFGLKHPPPQILIKNTPVPADPPTTFSQAKLASFITQYSTGQVSVEIEWELQKENSKRWNPEIQYTSNYYKSTNVDFAVNTEGTYSEPRPIGTRYLTRNL

SEQ ID NO: 328 - protein, 735 aa, synthetic construct
  REGION 1..735: note = source = /note="Description of Artificial Sequence: Synthetic polypeptide"
MAADGYLPDWLEDTLSEGIRQWWKLKPGPPPPKPAERHKDDSRGLVLPGYKYLGPFNGLDKGEPVNEADAAALEHDKAYDRQLDSGDNPYLKYNHADAEFQERLKEDTSFGGNLGRAVFQAKKRVLEPLGLVEPPVKTAPGKKRPVEHSPAEPDSSSGTGKAGQQPARKRLNFGQTGDADSVPDPQPLGQPPAAPSGLGSTTMATGSGAPMADNNEGADGVGNSSGNWHCDSQWLGDRVITTSTRTWALPTYNNHLYKQISSQSGASNDNHYFGYSTPWGYFDFNRFHCHFSPRDWQRLINNNWGFRPKRLNFKLFNIQVKEVTQNDGTTTIANNLTSTVQVFTDSEYQLPYVLGSAHQGCLPPFPADVFMVPQYGYLTLNNGSQAVGRSSFYCLEYFPSQMLRTGNNFQFSYTFEDVPFHSSYAHSQSLDRLMNPLIDQYLYYLNKTQSNSGTLQQSRLLFSQAGPTSMSLQAKNWLPGPCYRQQRLSKQANDNNNSNFPWTAATKYHLNGRDSLVNPGPAMASHKDDEEKFFPMHGTLIFGKQGTNANDADLDNVMITDEEEIRTTNPVATEQYGYVSNNLQNSNTGPTTGTVNHQGALPGMVWQDRDVYLQGPIWAKIPHTDGHFHPSPLMGGFGLKHPPPQIMIKNTPVPANPPTNFSSAKFASFITQYSTGQVSVEIEWELQKENSKRWNPEIQYTSNYNKSVNVDFTVDTNGVYSEPRPIGTRYLTRNL

SEQ ID NO: 329 - protein, 735 aa, synthetic construct
  REGION 1..735: note = source = /note="Description of Artificial Sequence: Synthetic polypeptide"
MAADGYLPDWLEDTLSEGIRQWWKLKPGPPPPKPAERHKDDSRGLVLPGYKYLGPFNGLDKGEPVNEADAAALEHDKAYDRQLDSGDNPYLKYNHADAEFQERLKEDTSFGGNLGRAVFQAKKRVLEPLGLVEGPVKTAPGKKRPVEHSPAEPDSSSGTGKAGQQPARKRLNFGQTGDADSVPDPQPLGQPPAAPSGLGSTTMATGSGAPMADNNEGADGVGNSSGNWHCDSQWLGDRVITTSTRTWALPTYNNHLYKQISSQSGASNDNHYFGYSTPWGYFDFNRFHCHFSPRDWQRLINNNWGFRPKRLNFKLFNIQVKEVTQNDGTTTIANNLTSTVQVFTDSEYQLPYVLGSAHQGCLPPFPADVFMVPQYGYLTLNNGSQAVGRSSFYCLEYFPSQMLRTGNNFQFSYTFEDVPFHSSYAHSQSLDRLMNPLIDQYLYYLNKTQSNSGTLQQSRLLFSQAGPTSMSLQAKNWLPGPCYRQQRLSKQANDNNNSNFPWTAATKYHLNGRDSLVNPGPAMASHKDDEEKFFPMHGTLIFGKQGTNANDADLDNVMITDEEEIRTTNPVATEQYGYVSNNLQNSNTGPTTGTVNHQGALPGMVWQDRDVYLQGPIWAKIPHTDGHFHPSPLMGGFGLKHPPPQIMIKNTPVPANPPTNFSSAKFASFITQYSTGQVSVEIEWELQKENSKRWNPEIQYTSNYNKSVNVDFTVDTNGVYSEPRPIGTRYLTRNL

SEQ ID NO: 330 - DNA, 2208 bp, synthetic construct
  misc_feature 1..2208: note = source = /note="Description of Artificial Sequence: Synthetic polynucleotide"
  source 1..2208: mol_type = other DNA
atggctgccgatggttatcttccagattggctcgaggacactctctctgaaggaataagacagtggtggaagctcaaacctggcccaccaccaccaaagcccgcagagcggcataaggacgacagcaggggtcttgtgcttcctgggtacaagtacctcggacccttcaacggactcgacaagggggagccggtcaacgaggcagacgccgcggccctcgagcacgacaaggcctacgaccggcagctcgacagcggagacaacccgtacctcaagtacaaccacgccgacgcggagtttcaggagcgtcttaaagaagatacgtcttttgggggcaacctcggacgagcagtcttccaggcgaaaaagagggttcttgaacctctgggcctggttgagggacctgttaagacggctccgggaaaaaagaggccggtagagcactctcctgcggagccagactcctcctcgggaaccggaaaagcgggccagcagcctgcaagaaaaagattgaattttggtcagactggagacgcagactccgtacctgacccccagcctctcggacagccaccagcagccccctctggtttgggatctactacaatggctacaggcagtggcgcaccaatggcagacaataacgagggtgccgatggagtgggtaattcctcaggaaattggcattgcgattcccaatggctgggcgacagagtcatcaccaccagcacccgaacctgggccctgcccacctacaacaaccacctctacaagcaaatctcaagccaatcaggagcctcaaacgacaaccactactttggctacagcaccccttgggggtattttgacttcaacagattccactgccacttttcaccacgtgactggcaaagactcatcaacaacaactggggattccgacccaagagactcaacttcaagctctttaacattcaagtcaaagaggtcacgcagaatgacggtacgacgacgattgccaataaccttaccagcacggttcaggtgtttactgactcggagtaccagctcccgtacgtcctcgggtcggcgcatcaaggatgcctcccgccgtttccagcggacgtcttcatggtcccacagtatggatacctcaccctgaacaacgggagtcaggcggtaggacgctcttccttttactgcctggagtactttccttctcagatgcttcgtactggaaacaactttcagttcagctacacctttgaagacgttcctttccacagcagctacgctcacagccagagtctggatcggctgatgaatcctctgatcgaccagtacctgtattatctgaacaaaacacaatcaaatagtggaactcttcagcagtctcggctactgtttagtcaagctggacccaccagcatgtctcttcaagctaaaaactggctacctggaccttgctacagacagcagcgtctgtcaaagcaggcaaacgacaacaacaacagcaactttccctggactgcggctacaaagtatcacctaaatggccgggactcgttggttaatccaggaccagctatggccagtcacaaagacgatgaagaaaagtttttccccatgcatggaaccctgatatttggtaaacaaggaacaaatgctaacgacgcggatttggacaatgtcatgattacagatgaagaagaaatccgcaccaccaatcccgtggctacggagcagtacggatatgtgtcaaataatttgcaaaactcaaatactggtccaactactggaactgtcaatcaccaaggagcgttacctggcatggtgtggcaggatcgagacgtgtacctgcagggacccatttgggccaagattcctcacaccgatggacactttcatccttctccactgatgggaggttttgggctcaaacacccgcctcctcagatcatgatcaaaaacactcccgttccagccaatcctcccacaaacttcagttctgccaagtttgcttctttcatcacacagtattccacggggcaggtcagcgtggagatcgagtgggagctgcagaaagagaacagcaaacgctggaatcccgaaattcagtacacttccaactacaacaaatctgttaatgtggactttactgtggacactaatggcgtgtattcagagcctcgccccattggcaccagatacctgactcgtaatctgtaa

SEQ ID NO: 331 - DNA, 2211 bp, synthetic construct; identical to SEQ ID NO: 12
  misc_feature 1..2211: note = source = /note="Description of Artificial Sequence: Synthetic polynucleotide"
  source 1..2211: mol_type = other DNA

SEQ ID NO: 332 - DNA, 2208 bp, synthetic construct
  misc_feature 1..2208: note = source = /note="Description of Artificial Sequence: Synthetic polynucleotide"
  source 1..2208: mol_type = other DNA
atggctgccgatggttatcttccagattggctcgaggacactctctctgaaggaacaagacagtggtggaagctcaaacctggcccaccaccaccaaagcccgcagagcggcataaggacgacagcaggggtcttgtgcttcctgggtacaagtacctcggacccttcaacggactcgacaagggggagccggtcaacgaggcagacgccgcggccctcgagcacgacaaggcctacgaccggcagctcgacagcggagacaacccgtacctcaagtacaaccacgccgacgcggagtttcaggagcgtcttaaagaagatacgtcttttgggggcaacctcggacgagcagtcttccaggcgaaaaagagggttcttgaacctctgggcctggttgaggaacctgttaagacggctccgggaaaaaagaggccggtagagcactctcctgcggagccagactcctcctcgggaaccggaaaagcgggccagcagcctgcaagaaaaagattgaattttggtcagactggagacgcagactccgtacctgacccccagcctctcggacagccaccagcagccccctctggtttgggatctactacaatggctacaggcagtggcgcaccaatggcagacaataacgagggtgccgatggagtgggtaattcctcaggaaattggcattgcgattcccaatggctgggcgacagagtcatcaccaccagcacccgaacctgggccctgcccacctacaacaaccacctctacaagcaaatctcaagccaatcaggagcctcaaacgacaaccactactttggctacagcaccccttgggggtattttgacttcaacagattccactgccacttttcaccacgtgactggcaaagactcatcaacaacaactggggattccgacccaagagactcaacttcaagctctttaacattcaagtcaaagaggtcacgcagaatgacggtacgacgacgattgccaataaccttaccagcacggttcaggtgtttactgactcggagtaccagctcccgtacgtcctcgggtcggcgcatcaaggatgcctcccgccgtttccagcggacgtcttcatggtcccacagtatggatacctcaccctgaacaacgggagtcaggcggtaggacgctcttccttttactgcctggagtactttccttctcagatgcttcgtactggaaacaactttcagttcagctacacctttgaagacgttcctttccacagcagctacgctcacagccagagtctggatcggctgatgaatcctctgatcgaccagtacctgtattatctgaacaaaacacaatcaaatagtggaactcttcagcagtctcggctactgtttagtcaagctggacccaccagcatgtctcttcaagctaaaaactggctacctggaccttgctacagacagcagcgtctgtcaaagcaggcaaacgacaacaacaacagcaactttccctggactgcggctacaaagtaccacctaaatggccgggactcgttggttaatccaggaccagctatggccagtcacaaagacgatgaagaaaagtttttccccatgcatggaaccctgatatttggtaaacaaggaacaaatgctaacgacgcggatttggacaatgtcatgattacagatgaagaagaaatccgcaccaccaatcccgtggctacggagcagtacggatatgtgtcaaataatttgcaaaactcaaatactggtccaactactggaactgtcaatcaccaaggagcgttacctggcatggtgtggcaggatcgagacgtgtacctgcagggacccatttgggccaagattcctcacaccgatggacactttcatccttctccactgatgggaggttttgggctcaaacacccgcctcctcagatcatgatcaaaaacactcccgttccagccaatcctcccacaaacttcagttctgccaagtttgcttctttcatcacacagtattccacggggcaggtcagcgtggagatcgagtgggagctgcagaaagagaacagcaaacgctggaatcccgaaattcagtacacttccaactacaacaaatctgttaatgtggactttactgtggacactaatggcgtgtattcagagcctcgccccattggcaccagatacctgactcgtaatctgtaa

SEQ ID NO: 333 - DNA, 2217 bp, synthetic construct
  misc_feature 1..2217: note = source = /note="Description of Artificial Sequence: Synthetic polynucleotide"
  source 1..2217: mol_type = other DNA
atggctgctgacggttatcttccagattggctcgaggacaacctctctgagggcattcgcgagtggtgggacctgaaacctggagcccccaagcccaaggccaaccagcagaagcaggacgacggccggggtctggtgcttcctggctacaagtacctcggacccttcaacggactcgacaagggggagcccgtcaacgcggcggacgcagcggccctcgagcacgacaaggcctacgaccagcagctcaaagcgggtgacaatccgtacctgcggtataaccacgccgacgccgagtttcaggagcgtctgcaagaagatacgtcttttgggggcaacctcgggcgagcagtcttccaggccaagaagcgggttctcgaacctctcggtctggttgaggaagctgctaagacggctcctggaaagaagagaccggtagaaccgtcacctcagcgttcccccgactcctccacgggcatcggcaagaaaggccagcagcccgctaaaaagagactgaactttggtcagactggcgactcagagtcagtccccgaccctcaaccaatcggagaaccacctgcaggcccctctggtctgggatctggtacaatggctgcaggcggtggcgctccaatggcagacaataacgaaggcgccgacggagtgggtagttcctcaggaaattggcattgcgattccacatggctgggcgacagagtcatcaccaccagcacccgaacctgggccctgcccacctacaacaaccacctctacaagcaaatatccaatgggacatcgggagggagcaccaacgacaacacctacttcggctacagcaccccctgggggtattttgacttcaacagattccactgccacttctcaccacgtgactggcagcgactcatcaacaacaactggggattccggccaaaaagactcagcttcaagctcttcaacatccaggtcaaggaggtcacgcagaatgaaggcaccaagaccatcgccaataaccttaccagcacgattcaggtatttacggactcggaataccagctgccgtacgtcctcggctccgcgcaccagggctgcctgcctccgttcccggcggacgtcttcatgattccccagtacggctaccttacactgaacaatggaagtcaagccgtaggccgttcctccttctactgcctggaatattttccatctcaaatgctgcgaactggaaacaattttgaattcagctacaccttcgaggacgtgcctttccacagcagctacgcacacagccagagcttggaccgactgatgaatcctctcatcgaccagtacctgtactacttatccagaactcagtccacaggaggaactcaaggtacccagcaattgttattttctcaagctgggcctgcaaacatgtcggctcaggctaagaactggctacctggaccttgctaccggcagcagcgagtctctacgacactgtcgcaaaacaacaacagcaactttgcttggactggtgccaccaaatatcacctgaacggaagagactctttggtaaatcccggtgtcgccatggcaacccacaaggacgacgaggaacgcttcttcccgtcgagtggagtcctgatgtttggaaaacagggtgctggaagagacaatgtggactacagcagcgttatgctaaccagcgaagaagaaattaaaaccactaaccctgtagccacagaacaatacggtgtggtggctgacaacttgcagcaaaccaatacagggcctattgtgggaaatgtcaacagccaaggagccttacctggcatggtctggcagaaccgagacgtgtacctgcagggtcccatctgggccaagattcctcacacggacggcaactgccacccttcaccgctaatgggaggatttggactgaagcacccacctcctcagatcctgatcaagaacacgccggtacctgcggatcctccaacaacgttcagccaggcgaaattggcttccttcattacgcagtacagcaccggacaggtcagcgtggaaatcgagtgggagctgcagaaggagaacagcaaacgctggaacccagagattcagtacacttcaaactactacaaatctacaaatgtggactttgctgtcaatacagagggaacttattctgagcctcgccccattggtactcgttacctcacccgtaatctgtaa

SEQ ID NO: 334 - protein, 735 aa, synthetic construct
  REGION 1..735: note = source = /note="Description of Artificial Sequence: Synthetic polypeptide"
MAADGYLPDWLEDTLSEGTRQWWKLKPGPPPPKPAERHKDDSRGLVLPGYKYLGPFNGLDKGEPVNEADAAALEHDKAYDRQLDSGDNPYLKYNHADAEFQERLKEDTSFGGNLGRAVFQAKKRVLEPLGLVEEPVKTAPGKKRPVEHSPAEPDSSSGTGKAGQQPARKRLNFGQTGDADSVPDPQPLGQPPAAPSGLGSTTMATGSGAPMADNNEGADGVGNSSGNWHCDSQWLGDRVITTSTRTWALPTYNNHLYKQISSQSGASNDNHYFGYSTPWGYFDFNRFHCHFSPRDWQRLINNNWGFRPKRLNFKLFNIQVKEVTQNDGTTTIANNLTSTVQVFTDSEYQLPYVLGSAHQGCLPPFPADVFMVPQYGYLTLNNGSQAVGRSSFYCLEYFPSQMLRTGNNFQFSYTFEDVPFHSSYAHSQSLDRLMNPLIDQYLYYLNKTQSNSGTLQQSRLLFSQAGPTSMSLQAKNWLPGPCYRQQRLSKQANDNNNSNFPWTAATKYHLNGRDSLVNPGPAMASHKDDEEKFFPMHGTLIFGKQGTNANDADLDNVMITDEEEIRTTNPVATEQYGYVSNNLQNSNTGPTTGTVNHQGALPGMVWQDRDVYLQGPIWAKIPHTDGHFHPSPLMGGFGLKHPPPQIMIKNTPVPANPPTNFSSAKFASFITQYSTGQVSVEIEWELQKENSKRWNPEIQYTSNYNKSVNVDFTVDTNGVYSEPRPIGTRYLTRNL

SEQ ID NO: 335 - DNA, 2208 bp, synthetic construct
  misc_feature 1..2208: note = source = /note="Description of Artificial Sequence: Synthetic polynucleotide"
  source 1..2208: mol_type = other DNA
atggctgccgatggttatcttccagattggctcgaggacactctctctgaaggaataagacagtggtggaagctcaaacctggcccaccaccaccaaagcccgcagagcggcatcaggacaacagcaggggtcttgtgcttcctgggtacaagtacctcggaccctccaacggactcgacaaaggagagccggtcaacgaggcagacgccgcggccctcgagcacgacaaggcctacgaccggcagctcgacagcggagacaacccgtacctcaagtacaaccacgccgacgcggagtttcaggagcgtcttaaagaagatacgtcttttgggggcaacctcggacgagcagtcttccaggcgaaaaagagggttcttgaacctctgggcctggttgaggaacctgttaagacggctccgggaaaaaagaggccggtagagcactctcctgtggagccagactcctcctcgggaaccggaaaagcgggccatcagcctgcgagaaagagattgaattttggtcagactggagacgcagactccgtacctgacccccagcctctcggacagccaccagcagcccccacaagtttgggatctactacaatggctacaggcagtggcgcaccaatggcagacaataacgagggtgccgatggagtgggtaattcctcaggaaattggcattgcgattcccaatggctgggcgacagagtcatcaccaccagcacccgaacctgggccctgcccacctacaacaaccacctctacaagcaaatctccagccaatcaggagcctcgaacgacaaccactactttggctgcagcaccccctgggggtattttgacttcaacagattccactgtcacttctccccacgtgattggcaaagactcatcaacaacaactggggattccgacccaagagactcaacttcaagctctttaacattcaagtcaaagaggtcacgcagaatgacggtacgacgacgattgccaataaccttaccagcacggttcaggtgtttactgactcggagtacccgctcccgtacgtcctcggctcggcgcatcaaggatgcctcccgccgtttccagcggacgtcttcatggtcccacagtatggatacctcaccctgaacaacgggagtcaggcggtaggacgctcttccttttactgcctggagtactttccttctcagatgctgcgtaccggaaacaactttaccttcagctacacctttgaggacgttcctttccacagcagctacgctcacagccagagtttggaccggctgatgaatcctctgatcgaccagtatctatattatctgaacaggacacaatcaaatagtggaactcttcagcagtctaggctactgtttagccaagctggacccaccagcatgtctcttcaagctaaaaactggctgcctggaccttgctacagacagcagcgtctttcaaagcaggcaaacgacaacaacaacagcaactttccctggactgcggctacaaagtatcatctaaatggccgggactcgttggttaatccaggaccagctatggccagccacaaagacgatgaagaaaagtttttccccatgcatggaaccctgatatttggtaaacaaggaacaaatgctaacgacgcggatttggagcatgttatgattacagatgaagaagaaatcaggaccaccaatcctgtggctacagagcagtacggaaacgtgtcaaataatttgcaaaactcaaatactggtccaactacagaaaatgtcaatcaccagggagcgttacctggtatggtgtggcaggatcgagacgtgtacctgcagggacccatttgggccaagattcctcacaccgacggacactttcacccttctccactgatgggaggttttggactcaaacacccgcctcctcaaatcatgatcaaaaacactcccgttccagccaatcctcccacaaacttcagttctgccaagtttgcttctttcatcacacagtattccacgggccaggtcagcgtggagattgagtgggagctgcagaaggagaacagcaaacgctggaaccccgagatccagtatacttccaactacaacaaatctgttaatgtggactttactgtggacactaatggtgtgtattcagagccttgccccattggcaccagatacctgactcgtaatctgtaa

SEQ ID NO: 336 - protein, 735 aa, synthetic construct
  REGION 1..735: note = source = /note="Description of Artificial Sequence: Synthetic polypeptide"
MAADGYLPDWLEDTLSEGIRQWWKLKPGPPPPKPAERHQDNSRGLVLPGYKYLGPSNGLDKGEPVNEADAAALEHDKAYDRQLDSGDNPYLKYNHADAEFQERLKEDTSFGGNLGRAVFQAKKRVLEPLGLVEEPVKTAPGKKRPVEHSPVEPDSSSGTGKAGHQPARKRLNFGQTGDADSVPDPQPLGQPPAAPTSLGSTTMATGSGAPMADNNEGADGVGNSSGNWHCDSQWLGDRVITTSTRTWALPTYNNHLYKQISSQSGASNDNHYFGCSTPWGYFDFNRFHCHFSPRDWQRLINNNWGFRPKRLNFKLFNIQVKEVTQNDGTTTIANNLTSTVQVFTDSEYPLPYVLGSAHQGCLPPFPADVFMVPQYGYLTLNNGSQAVGRSSFYCLEYFPSQMLRTGNNFTFSYTFEDVPFHSSYAHSQSLDRLMNPLIDQYLYYLNRTQSNSGTLQQSRLLFSQAGPTSMSLQAKNWLPGPCYRQQRLSKQANDNNNSNFPWTAATKYHLNGRDSLVNPGPAMASHKDDEEKFFPMHGTLIFGKQGTNANDADLEHVMITDEEEIRTTNPVATEQYGNVSNNLQNSNTGPTTENVNHQGALPGMVWQDRDVYLQGPIWAKIPHTDGHFHPSPLMGGFGLKHPPPQIMIKNTPVPANPPTNFSSAKFASFITQYSTGQVSVEIEWELQKENSKRWNPEIQYTSNYNKSVNVDFTVDTNGVYSEPCPIGTRYLTRNL

SEQ ID NO: 337 - DNA, 2214 bp, synthetic construct
  misc_feature 1..2214: note = source = /note="Description of Artificial Sequence: Synthetic polynucleotide"
  source 1..2214: mol_type = other DNA
atggctgccgatggttatcttccagattggctcgaggacaaccttagtgaaggaattcgcgagtggtgggctttgaaacctggagcccctcaacccaaggcaaatcaacaacatcaagacaacgctcgaggtcttgtgcttccgggttacaaataccttggacccggcaacggactcgacaagggggagccggtcaacgcagcagacgcggcggccctcgagcacgacaaggcctacgaccagcagctgcaggcgggtgacaatccgtacctgcggtataaccacgccgacgccgagtttcaggagcgtctgcaagaagatacgtcttttgggggcaaccttggcagagcagtcttccaggccaaaaagaggatccttgagcctcttggtctggttgaggaagcagctaaaacggctcctggaaagaagaggcctgtagatcagtctcctcaggaaccggactcatcatctggtgttggcaaatcgggcaaacagcctgccagaaaaagactaaatttcggtcagactggcgactcagagtcagtcccagaccctcaacctctcggagaaccaccagcagcccccacaagtttgggatctaatacaatggcttcaggcggtggcgcaccaatggcagacaataacgagggtgccgatggggtgggtagttcctcgggaaattggcattgcgattcccaatggctgggggacagagtcatcaccaccagcacccgaacctgggccctgcccacctacaacaatcacctctacaagcaaatctccaacgggacatcgggaggagccaccaacgacaacacctacttcggctacagcaccccctgggggtattttgactttaacagattccactgccacttttcaccacgtgactggcagcgactcatcaacaacaactggggattccggcccaagagactcagcttcaagctcttcaacatccaggtcaaggaggtcacgcagaatgaaggcaccaagaccatcgccaataacctcaccagcaccatccaggtgtttacggactcggagtaccagctgccgtacgttctcggctctgcgcaccagggctgcctccctccgttcccggcggacgtgttcatgattccgcaatacggctacctgacgctcaacaatggcagccaagccgtgggacgttcatccttttactgcctggaatatttcccttctcagatgctgagaacgggcaacaactttaccttcagctacacctttgaggaagtgcctttccacagcagctacgcgcacagccagagcttggaccggctgatgaatcctctgattgaccagtacctgtactacttgtctcggactcaaacaacaggaggcacggcaaatacgcagactctgggcttcagccaaggtgggcctaatacaatggccaatcaggcaaagaactggctgccaggaccctgttaccgccaacaacgcgtctcaacgacaaccgggcaaaacaacaatagcaactttgcctggactgctgggaccaaataccatctgaatggaagaaattcattggctaatcctggcatcgctatggcaacacacaaagacgacgaggagcgtttttttcccagtaacgggatcctgatttttggcaaacaaaatgctgccagagacaatgcggattacagcgatgtcatgctcaccagcgaggaagaaatcaaaaccactaaccctgtggctacagaggaatacggtatcgtggcagataacttgcagcagcaaaacacggctcctcaaattggaactgtcaacagccagggggccttacccggtatggtctggcagaaccgggacgtgtacctgcagggtcccatctgggccaagattcctcacacggacggcaacttccacccgtctccgctgatgggcggctttggcctgaaacatcctccgcctcagatcctgatcaagaacacgcctgtacctgcggatcctccgaccaccttcaaccagtcaaagctgaactctttcatcacgcaatacagcaccggacaggtcagcgtggagatcgagtgggagctgcagaaggaaaacagcaagcgctggaacccggagatccagtacacttccaactattacaagtctaataatgttgaatttgctgttaatactgaaggtgtatatagtgaaccccgccccattggcaccagatacctgactcgtaatctgtaa

SEQ ID NO: 338 - protein, 737 aa, synthetic construct
  REGION 1..737: note = source = /note="Description of Artificial Sequence: Synthetic polypeptide"
MAADGYLPDWLEDNLSEGIREWWALKPGAPQPKANQQHQDNARGLVLPGYKYLGPGNGLDKGEPVNAADAAALEHDKAYDQQLQAGDNPYLRYNHADAEFQERLQEDTSFGGNLGRAVFQAKKRILEPLGLVEEAAKTAPGKKRPVDQSPQEPDSSSGVGKSGKQPARKRLNFGQTGDSESVPDPQPLGEPPAAPTSLGSNTMASGGGAPMADNNEGADGVGSSSGNWHCDSQWLGDRVITTSTRTWALPTYNNHLYKQISNGTSGGATNDNTYFGYSTPWGYFDFNRFHCHFSPRDWQRLINNNWGFRPKRLSFKLFNIQVKEVTQNEGTKTIANNLTSTIQVFTDSEYQLPYVLGSAHQGCLPPFPADVFMIPQYGYLTLNNGSQAVGRSSFYCLEYFPSQMLRTGNNFTFSYTFEEVPFHSSYAHSQSLDRLMNPLIDQYLYYLSRTQTTGGTANTQTLGFSQGGPNTMANQAKNWLPGPCYRQQRVSTTTGQNNNSNFAWTAGTKYHLNGRNSLANPGIAMATHKDDEERFFPSNGILIFGKQNAARDNADYSDVMLTSEEEIKTTNPVATEEYGIVADNLQQQNTAPQIGTVNSQGALPGMVWQNRDVYLQGPIWAKIPHTDGNFHPSPLMGGFGLKHPPPQILIKNTPVPADPPTTFNQSKLNSFITQYSTGQVSVEIEWELQKENSKRWNPEIQYTSNYYKSNNVEFAVNTEGVYSEPRPIGTRYLTRNL

SEQ ID NO: 339 - DNA, 2211 bp, synthetic construct
  misc_feature 1..2211: note = source = /note="Description of Artificial Sequence: Synthetic polynucleotide"
  source 1..2211: mol_type = other DNA
atggctgccgatggttatcttccagattggctcgaggacaacctctctgagggcattcgcgagtggtgggacttgaaacctggagccccgaagcccaaagccaaccagcaaaagcaggacgacggccggggtctggtgcttcctggctacaagtacctcggacccttcaacggactcgacaagggggagcccgtcaacgcggcggacgcagcggccctcgagcacgacaaggcctacgaccagcagctcaaagcgggtgacaatccgtacctgcggtataaccacgccgacgccgagtttcaggagcgtctgcaagaagatacgtcttttgggggcaacctcgggcgagcagtcttccaggccaagaagcgggttctcgaacctctcggtctggttgaggaaggcgctaagacggctcctggaaagaaacgtccggtagagcagtcgccacaagagccagactcctcctcgggcatcggcaagacaggccagcagcccgctaaaaagagactcaattttggtcagactggcgactcagagtcagtccccgacccacaacctctcggagaacctccagcaacccccgctgctgtgggacctactacaatggcttcaggcggtggcgcaccaatggcagacaataacgaaggcgccgacggagtgggtaatgcctcaggaaattggcattgcgattccacatggctgggcgacagagtcatcaccaccagcacccgaacatgggccttgcccacctataacaaccacctctacaagcaaatctccagtgcttcaacgggggccagcaacgacaaccactacttcggctacagcaccccctgggggtattttgatttcaacagattccactgccatttctcaccacgtgactggcagcgactcatcaacaacaattggggattccggcccaagagactcaacttcaagctcttcaacatccaagtcaaggaggtcacgacgaatgatggcgtcacgaccatcgctaataaccttaccagcacggttcaagtcttctcggactcggagtaccagctgccgtacgttctcggctctgcccaccagggctgcctgcctccgttcccggcggacgtgttcatgattccccagtacggctacctaacactcaacaacggtagtcaggccgtgggacgctcctccttctactgcctggaatactttccttcgcagatgctgagaaccggcaacaacttccagtttacttacaccttcgaggacgtgcctttccacagcagctacgcccacagccagagcttggaccggctgatgaatcctctgattgaccagtacctgtactacttgtctcggactcaaacaacaggaggcacggcaaatacgcagactctgggcttcagccaaggtgggcctaatacaatggccaatcaggcaaagaactggctgccaggaccctgttaccgccaacaacgcgtctcaacgacaaccgggcaaaacaacaatagcaattttacctggactggtgcttcaaaatataacctcaatgggcgtgaatccatcatcaaccctggcactgctatggcctcacacaaagacgacgaagacaagttctttcccatgagcggtgtcatgatttttggaaaagagagcgccggagcttcaaacactgcattggacaatgtcatgattacagacgaagaggaaattaaagccactaaccctgtggccaccgaaagatttgggaccgtggcagtcaatttccagagcagcagcacagaccctgcgaccggagatgtgcatgctatgggagcattacctggcatggtgtggcaagatagagacgtgtacctgcagggtcccatttgggccaaaattcctcacacagatggacactttcacccgtctcctcttatgggcggctttggactcaagaacccgcctcctcagatcctcatcaaaaacacgcctgttcctgcgaatcctccggcggagttttcagctacaaagtttgcttcattcatcacccaatactccacaggacaagtgagtgtggaaattgaatgggagctgcagaaagaaaacagcaagcgctggaatcccgaagtgcagtacacatccaattatgcaaaatctgccaacgttgattttactgtggacaacaatggactttatactgagcctcgccccattggcacccgttacctcacccgtcccctgtaa

SEQ ID NO: 340 - protein, 736 aa, synthetic construct
  REGION 1..736: note = source = /note="Description of Artificial Sequence: Synthetic polypeptide"
MAADGYLPDWLEDNLSEGIREWWDLKPGAPKPKANQQKQDDGRGLVLPGYKYLGPFNGLDKGEPVNAADAAALEHDKAYDQQLKAGDNPYLRYNHADAEFQERLQEDTSFGGNLGRAVFQAKKRVLEPLGLVEEGAKTAPGKKRPVEQSPQEPDSSSGIGKTGQQPAKKRLNFGQTGDSESVPDPQPLGEPPATPAAVGPTTMASGGGAPMADNNEGADGVGNASGNWHCDSTWLGDRVITTSTRTWALPTYNNHLYKQISSASTGASNDNHYFGYSTPWGYFDFNRFHCHFSPRDWQRLINNNWGFRPKRLNFKLFNIQVKEVTTNDGVTTIANNLTSTVQVFSDSEYQLPYVLGSAHQGCLPPFPADVFMIPQYGYLTLNNGSQAVGRSSFYCLEYFPSQMLRTGNNFQFTYTFEDVPFHSSYAHSQSLDRLMNPLIDQYLYYLSRTQTTGGTANTQTLGFSQGGPNTMANQAKNWLPGPCYRQQRVSTTTGQNNNSNFTWTGASKYNLNGRESIINPGTAMASHKDDEDKFFPMSGVMIFGKESAGASNTALDNVMITDEEEIKATNPVATERFGTVAVNFQSSSTDPATGDVHAMGALPGMVWQDRDVYLQGPIWAKIPHTDGHFHPSPLMGGFGLKNPPPQILIKNTPVPANPPAEFSATKFASFITQYSTGQVSVEIEWELQKENSKRWNPEVQYTSNYAKSANVDFTVDNNGLYTEPRPIGTRYLTRPL

SEQ ID NO: 341 - DNA, 2211 bp, synthetic construct
  misc_feature 1..2211: note = source = /note="Description of Artificial Sequence: Synthetic polynucleotide"
  source 1..2211: mol_type = other DNA
atggctgctgacggttatcttccagattggctcgaggacaacctttctgaaggcattcgagagtggtgggcgctgcaacctggagcccctaaacccaaggcaaatcaacaacatcaggacaacgctcggggtcttgtgcttccgggttacaaatacctcggacccggcaacggactcgacaagggggaacccgtcaacgcagcggacgcggcagccctcgagcacgacaaggcctacgaccagcagctcaaggccggtgacaacccctacctcaagtacaaccacgccgacgccgagttccaggagcggctcaaagaagatacgtcttttgggggcaacctcgggcgagcagtcttccaggccaaaaagaggcttcttgaacctcttggtctggttgaggaagcggctaagacggctcctggaaagaagaggcctgtagatcagtctcctcaggaaccggactcatcatctggtgttggcaaatcgggcaaacagcctgccagaaaaagactaaatttcggtcagactggcgactcagagtcagtcccagaccctcaacctctcggagaaccaccagcagcccccacaagtttgggatctaatacaatggcttcaggcggtggcgcaccaatggcagacaataacgagggtgccgatggagtgggtaattcctcaggaaattggcattgcgattcccaatggctgggcgacagagtcatcaccaccagcaccagaacctgggccctgcccacttacaacaaccatctctacaagcaaatctccagccaatcaggagcttcaaacgacaaccactactttggctacagcaccccttgggggtattttgactttaacagattccactgccacttctcaccacgtgactggcagcgactcattaacaacaactggggattccggcccaagaaactcagcttcaagctcttcaacatccaagttaaagaggtcacgcagaacgatggcacgacgactattgccaataaccttaccagcacggttcaagtgtttacggactcggagtatcagctcccgtacgtgctcgggtcggcgcaccaaggctgtctcccgccgtttccagcggacgtcttcatggtccctcagtatggatacctcaccctgaacaacggaagtcaagcggtgggacgctcatccttttactgcctggagtacttcccttcgcagatgctaaggactggaaataacttccaattcagctataccttcgaggatgtaccttttcacagcagctacgctcacagccagagtttggatcgcttgatgaatcctcttattgatcagtatctgtactacctgaacagaacgcaaggaacaacctctggaacaaccaaccaatcacggctgctttttagccaggctgggcctcagtctatgtctttgcaggccagaaattggctacctgggccctgctaccggcaacagagactttcaaagactgctaacgacaacaacaacagtaactttccttggacagcggccagcaaatatcatctcaatggccgcgactcgctggtgaatccaggaccagctatggccagtcacaaggacgatgaagaaaaatttttccctatgcacggcaatctaatatttggcaaagaagggacaacggcaagtaacgcagaattagataatgtaatgattacggatgaagaagagattcgtaccaccaatcctgtggcaacagagcagtatggaactgtggcaaataacttgcagagctcaaatacagctcccacgactagaactgtcaatgatcagggggccttacctggcatggtgtggcaagatcgtgacgtgtaccttcaaggacctatctgggcaaagattcctcacacggatggacactttcatccttctcctctgatgggaggctttggactgaaacatccgcctcctcaaatcatgatcaaaaatactccggtaccggcaaatcctccgacgactttcagcccggccaagtttgcttcatttatcactcagtactccactggacaggtcagcgtggaaattgagtgggagctacagaaagaaaacagcaaacgttggaatccagagattcagtacacttccaactacaacaagtctgttaatgtggactttactgtagacactaatggtgtttatagtgaacctcgccccattggcacccgttaccttacccgtcccctgtaa

SEQ ID NO: 342 - protein, 736 aa, synthetic construct
  REGION 1..736: note = source = /note="Description of Artificial Sequence: Synthetic polypeptide"
MAADGYLPDWLEDNLSEGIREWWALQPGAPKPKANQQHQDNARGLVLPGYKYLGPGNGLDKGEPVNAADAAALEHDKAYDQQLKAGDNPYLKYNHADAEFQERLKEDTSFGGNLGRAVFQAKKRLLEPLGLVEEAAKTAPGKKRPVDQSPQEPDSSSGVGKSGKQPARKRLNFGQTGDSESVPDPQPLGEPPAAPTSLGSNTMASGGGAPMADNNEGADGVGNSSGNWHCDSQWLGDRVITTSTRTWALPTYNNHLYKQISSQSGASNDNHYFGYSTPWGYFDFNRFHCHFSPRDWQRLINNNWGFRPKKLSFKLFNIQVKEVTQNDGTTTIANNLTSTVQVFTDSEYQLPYVLGSAHQGCLPPFPADVFMVPQYGYLTLNNGSQAVGRSSFYCLEYFPSQMLRTGNNFQFSYTFEDVPFHSSYAHSQSLDRLMNPLIDQYLYYLNRTQGTTSGTTNQSRLLFSQAGPQSMSLQARNWLPGPCYRQQRLSKTANDNNNSNFPWTAASKYHLNGRDSLVNPGPAMASHKDDEEKFFPMHGNLIFGKEGTTASNAELDNVMITDEEEIRTTNPVATEQYGTVANNLQSSNTAPTTRTVNDQGALPGMVWQDRDVYLQGPIWAKIPHTDGHFHPSPLMGGFGLKHPPPQIMIKNTPVPANPPTTFSPAKFASFITQYSTGQVSVEIEWELQKENSKRWNPEIQYTSNYNKSVNVDFTVDTNGVYSEPRPIGTRYLTRPL

SEQ ID NO: 343 - DNA, 2211 bp, synthetic construct
  misc_feature 1..2211: note = source = /note="Description of Artificial Sequence: Synthetic polynucleotide"
  source 1..2211: mol_type = other DNA
atggctgccgatggttatcttccagattggctcgaggacaaccttagtgaaggaattcgcgagtggtgggctttgaaacctggagcccctcaacccaaggcaaatcaacaacatcaagacaacgctcgaggtcttgtgcttccgggttacaaataccttggacccggcaacggactcgacaagggggagccggtcaacgcagcagacgcggcggccctcgagcacgacaaggcctacgaccagcagctcaaggccggagacaacccgtacctcaagtacaaccacgccgacgccgagttccaggagcggctcaaagaagatacgtcttttgggggcaacctcgggcgagcagtcttccaggccaaaaagaggcttcttgaacctcttggtctggttgaggaagcggctaagacggctcctggaaagaagagaccggtagagccatcaccccagcgttctccagactcctctacgggcatcggcaagaaaggccaacagcccgctaaaaagagactcaattttggtcagactggcgactcagagtcagtccccgacccacaacctctcggagaacctccagcaacccccgctgctgtgggacctactacaatggcttcaggcggtggcgcaccaatggcagacaataacgagggtgccgatggagtgggtaattcctcaggaaattggcattgcgattcccaatggctgggcgacagagtcatcaccaccagcaccagaacctgggccctgcccacttacaacaaccatctctacaagcaaatctccagccaatcaggagcttcaaacgacaaccactactttggctacagcaccccttgggggtattttgactttaacagattccactgccacttttcaccacgtgactggcaaagactcatcaacaacaactggggattccgacccaagagactcaacttcaagctcttcaacatccaagtcaaggaggtcacgacgaatgatggcgtcacgaccatcgctaataaccttaccagcacggttcaagtcttctcggactcggagtaccagttgccgtacgtcctcggctctgcgcaccagggctgcctccctccgttcccggcggacgtgttcatgattccgcagtacggctacctaacgctcaacaatggcagccaagccgtgggacgttcatccttttactgcctggaatatttcccttctcagatgctgagaacgggcaacaactttaccttcagctacacttttgaggacgttcctttccacagcagctacgctcacagccagagtctggaccgtctcatgaatcctctcatcgaccagtacctgtattacttgagcagaacaaacactccaagtggaaccaccacgcagtcaaggcttcagttttctcaggccggagcgagtgacattcgggaccagtctaggaactggcttcctggaccctgttaccgccagcagcgcgtttctaaaacaaaaacagacaacaacaacagcaattttacctggactggtgcttcaaaatataaccttaatgggcgtgaatctataatcaaccctggcactgctatggcctcacacaaagacgacgaagacaagttctttcccatgagcggtgtcatgatttttggaaaagagagcgccggagcttcaaacactgcattggacaatgtcatgattacagacgaagaggaaattaaagccactaaccctgtggccaccgaaagatttgggaccgtggcagtcaatttccagagcagcagcacagaccctgcgaccggagatgtgcatgttatgggagccttacctggaatggtgtggcaagacagagacgtatacctgcagggtcctatttgggccaaaattcctcacacggatggacactttcacccgtctcctcttatgggcggctttggactcaagaacccgcctcctcagatcctcatcaaaaacacgcctgttcctgcgaatcctccggcggagttttcagctacaaagtttgcttcattcatcacccaatactccacaggacaagtgagtgtggaaattgaatgggagctgcagaaagaaaacagcaagcgctggaatcccgaagtgcagtacacatccaattatgcaaaatctgccaacgttgattttactgtggacaacaatggactttatactgagcctcgccccattggcacccgttaccttacccgtcccctgtaa

SEQ ID NO: 344 - protein, 736 aa, synthetic construct
  REGION 1..736: note = source = /note="Description of Artificial Sequence: Synthetic polypeptide"
MAADGYLPDWLEDNLSEGIREWWALKPGAPQPKANQQHQDNARGLVLPGYKYLGPGNGLDKGEPVNAADAAALEHDKAYDQQLKAGDNPYLKYNHADAEFQERLKEDTSFGGNLGRAVFQAKKRLLEPLGLVEEAAKTAPGKKRPVEPSPQRSPDSSTGIGKKGQQPAKKRLNFGQTGDSESVPDPQPLGEPPATPAAVGPTTMASGGGAPMADNNEGADGVGNSSGNWHCDSQWLGDRVITTSTRTWALPTYNNHLYKQISSQSGASNDNHYFGYSTPWGYFDFNRFHCHFSPRDWQRLINNNWGFRPKRLNFKLFNIQVKEVTTNDGVTTIANNLTSTVQVFSDSEYQLPYVLGSAHQGCLPPFPADVFMIPQYGYLTLNNGSQAVGRSSFYCLEYFPSQMLRTGNNFTFSYTFEDVPFHSSYAHSQSLDRLMNPLIDQYLYYLSRTNTPSGTTTQSRLQFSQAGASDIRDQSRNWLPGPCYRQQRVSKTKTDNNNSNFTWTGASKYNLNGRESIINPGTAMASHKDDEDKFFPMSGVMIFGKESAGASNTALDNVMITDEEEIKATNPVATERFGTVAVNFQSSSTDPATGDVHVMGALPGMVWQDRDVYLQGPIWAKIPHTDGHFHPSPLMGGFGLKNPPPQILIKNTPVPANPPAEFSATKFASFITQYSTGQVSVEIEWELQKENSKRWNPEVQYTSNYAKSANVDFTVDNNGLYTEPRPIGTRYLTRPL

SEQ ID NO: 345 - DNA, 2211 bp, synthetic construct
  misc_feature 1..2211: note = source = /note="Description of Artificial Sequence: Synthetic polynucleotide"
  source 1..2211: mol_type = other DNA
atggctgccgatggttatcttccagattggctcgaggacaacctctctgagggcattcgcgagtggtgggacttgaaacctggagcccctaaacccaaggcaaatcaacaacatcaggacaacgctcgaggtcttgtgcttccgggttacaaataccttggacccggcaacggactcgacaagggggagccggtcaacgcagcagacgcggcggccctcgagcacgacaaggcctacgaccagcagctcaaggccggagacaacccgtacctcaagtacaaccacgccgacgccgagttccaggagcggctcaaagaagatacgtcttttgggggcaacctcgggcgagcagtcttccaggccaaaaagaggcttcttgaacctcttggtctggttgaggaagcggctaagacggctcctggaaagaagagaccggtagagccatcaccccagcgttctccagactcctctacgggcatcggcaagaaaggccaacagcccgctaaaaagagactcaattttggtcagactggcgactcagagtcagtccccgacccacaacctctcggagaacctccagcaacccccgctgctgtgggacctactacaatggcttcaggcggtggcgcaccaatggcagacaataacgagggtgccgatggagtgggtaattcctcaggaaattggcattgcgattcccaatggctgggcgacagagtcatcaccaccagcaccagaacctgggccctgcccacttacaacaaccatctctacaagcaaatctccagccaatcaggagcttcaaacgacaaccactactttggctacagcaccccttgggggtattttgactttaacagattccactgccacttttcaccacgtgactggcaaagactcatcaacaacaactggggattccgacccaagagactcaacttcaagctcttcaacatccaagtcaaggaggtcacgacgaatgatggcgtcacgaccatcgctaataaccttaccagcacggttcaagtcttctcggactcggagtaccagttgccgtacgtcctcggctctgcgcaccagggctgcctccctccgttcccggcggacgtgttcatgattccgcagtacggctacctaacgctcaacaatggcagccaagccgtgggacgttcatccttttactgcctggaatatttcccttctcagatgctgagaacgggcaacaactttaccttcagctacacttttgaggacgttcctttccacagcagctacgctcacagccagagtctggaccgtctcatgaatcccctcatcgaccagtacctgtattacttgagcagaacaaacactccaagtggaaccaccacgcagtcaaggcttcagttttctcaggccggagcgagtgacattcgggaccagtctaggaactggcttcctggaccctgttaccggcagcagcgcgtttctaaaacaaaaacagacaacaacaacagcaactttacctggactggtgcttcaaaatataaccttaatgggcgtgaatctataatcaaccctggcactgctatggcctcacacaaagacgacgaagacaagttctttcccatgagcggtgtcatgatttttggaaaggagagcgccggagcttcaaacactgcattggacaatgtcatgatcacagacgaagaggaaatcaaagccactaaccccgtggccaccgaaagatttgggactgtggcagtcaatctccagagcagcagcacagaccctgcgaccggagatgtgcatgttatgggagccttacctggaatggtgtggcaagacagagacgtgtacctgcagggtcctatttgggccaaaattcctcacacggatggacactttcacccgtctcctctcatgggcggctttggacttaagcacccgcctcctcagatcctcatcaaaaacacgcctgttcctgcgaatcctccggcagagttttcggctacaaagtttgcttcattcatcacccagtattccacaggacaagtgagtgtggaaattgaatgggagctgcagaaagaaaacagcaagcgctggaatcccgaagtgcagtacacatccaattatgcaaaatctgccaacgttgattttactgtggacaacaatggactttatactgagcctcgccccattggcacccgttacctcacccgtcccctgtaa

SEQ ID NO: 346 - protein, 736 aa, synthetic construct
  REGION 1..736: note = source = /note="Description of Artificial Sequence: Synthetic polypeptide"
MAADGYLPDWLEDNLSEGIREWWDLKPGAPKPKANQQHQDNARGLVLPGYKYLGPGNGLDKGEPVNAADAAALEHDKAYDQQLKAGDNPYLKYNHADAEFQERLKEDTSFGGNLGRAVFQAKKRLLEPLGLVEEAAKTAPGKKRPVEPSPQRSPDSSTGIGKKGQQPAKKRLNFGQTGDSESVPDPQPLGEPPATPAAVGPTTMASGGGAPMADNNEGADGVGNSSGNWHCDSQWLGDRVITTSTRTWALPTYNNHLYKQISSQSGASNDNHYFGYSTPWGYFDFNRFHCHFSPRDWQRLINNNWGFRPKRLNFKLFNIQVKEVTTNDGVTTIANNLTSTVQVFSDSEYQLPYVLGSAHQGCLPPFPADVFMIPQYGYLTLNNGSQAVGRSSFYCLEYFPSQMLRTGNNFTFSYTFEDVPFHSSYAHSQSLDRLMNPLIDQYLYYLSRTNTPSGTTTQSRLQFSQAGASDIRDQSRNWLPGPCYRQQRVSKTKTDNNNSNFTWTGASKYNLNGRESIINPGTAMASHKDDEDKFFPMSGVMIFGKESAGASNTALDNVMITDEEEIKATNPVATERFGTVAVNLQSSSTDPATGDVHVMGALPGMVWQDRDVYLQGPIWAKIPHTDGHFHPSPLMGGFGLKHPPPQILIKNTPVPANPPAEFSATKFASFITQYSTGQVSVEIEWELQKENSKRWNPEVQYTSNYAKSANVDFTVDNNGLYTEPRPIGTRYLTRPL

SEQ ID NO: 347 - DNA, 2214 bp, synthetic construct
  misc_feature 1..2214: note = source = /note="Description of Artificial Sequence: Synthetic polynucleotide"
  source 1..2214: mol_type = other DNA
atggctgccgatggttatcttccagattggctcgaggacaaccttagtgaaggaattcgcgagtggtgggctttgaaacctggagcccctcaacccaaggcaaatcaacaacatcaagacaacgctcgaggtcttgtgcttccgggttacaaataccttggacccggcaacggactcgacaagggggagccggtcaacgcagcagacgcggcggccctcgagcacgacaaggcctacgaccagcagctgcaggcgggtgacaatccgtacctgcggtataaccacgccgacgccgagtttcaggagcgtctgcaagaagatacgtcttttgggggcaaccttggcagagcagtcttccaggccaaaaagaggatccttgagcctcttggtctggttgaggaagcagctaaaacggctcctggaaagaagaggcctgtagatcagtctcctcaggaaccggactcatcatctggtgttggcaaatcgggcaaacagcctgccagaaaaagactaaatttcggtcagactggcgactcagagtcagtcccagaccctcaacctctcggagaaccaccagcagcccccacaagtttgggatctaatacaatggcttcaggcggtggcgcaccaatggcagacaataacgagggtgccgatggggtgggtagttcctcgggaaattggcattgcgattcccaatgactgggggacagagtcatcaccaccagcacccgaacctgggccctgcccacctacaacaatcacctctacaagcaaatctccaacgggacatcgggaggagccaccaacgacaacacctacttcggctacagcaccccctgggggtattttgactttaacagattccactgccacttttcaccacgtgactggcagcgactcatcaacaacaactggggattccggcccaagagactcagcttcaagctcttcaacatccaggtcaaggaggtcacgcagaatgaaggcaccaagaccatcgccaataacctcaccagcaccatccaggtgtttacggactcggagtaccagctgccgtacgttctcggctctgcgcaccagggctgcctccctccgttcccggcggacgtgttcatgattccgcaatacggctacctgacgctcaacaatggcagccaagccgtgggacgttcatccttttactgcctggaatatttcccttctcagatgctgagaacgggcaacaactttaccttcagctacacctttgaggaagtgcctttccacagcagctacgcgcacagccagagcttggaccggctgatgaatcctctgattgaccagtacctgtactacttgtctcggactcaaacaacaggaggcacggcaaatacgcagactctgggcttcagccaaggtgggcctaatacaatggccaatcaggcaaagaactggctgccaggaccctgttaccgccaacaacgcgtctcaacgacaaccgggcaaaacaacaatagcaactttgcctggactgctgggaccaaataccatctgaatggaagaaattcattggctaatcctggcatcgctatggcaacacacaaagacgacgaggagcgtttttttcccagtaacgggatcctgatttttggcaaacaaaatgctgccagagacaatgcggattacagcgatgtcatgctcaccagcgaggaagaaatcaaaaccactaaccctgtggctacagaggaatacggtatcgtggcagataacttgcagcagcaaaacacggctcctcaaattggaactgtcaacagccagggggccttacccggtatggtctggcagaaccgggacgtgtacctgcagggtcccatctgggccaagattcctcacacggacggcaacttccacccgtctccgctgatgggcggctttggcctgaaacatcctccgcctcagatcctgatcaagaacacgcctgtacctgcggatcctccgaccaccttcaaccagtcaaagctgaactctttcatcacgcaatacagcaccggacaggtcagcgtggagatcgagtgggagctgcagaaggaaaacagcaagcgctggaacccggagatccagtacacttccaactattacaagtctaataatgttgaatttgctgttaatactgaaggtgtatatagtgaaccccgccccattggcaccagatacctgactcgtaatctgtaa

SEQ ID NO: 348 - protein, 736 aa, synthetic construct
  REGION 1..736: note = source = /note="Description of Artificial Sequence: Synthetic polypeptide"
MAADGYLPDWLEDNLSEGIREWWALKPGAPQPKANQQHQDNARGLVLPGYKYLGPGNGLDKGEPVNAADAAALEHDKAYDQQLQAGDNPYLRYNHADAEFQERLQEDTSFGGNLGRAVFQAKKRILEPLGLVEEAAKTAPGKKRPVDQSPQEPDSSSGVGKSGKQPARKRLNFGQTGDSESVPDPQPLGEPPAAPTSLGSNTMASGGGAPMADNNEGADGVGSSSGNWHCDSQLGDRVITTSTRTWALPTYNNHLYKQISNGTSGGATNDNTYFGYSTPWGYFDFNRFHCHFSPRDWQRLINNNWGFRPKRLSFKLFNIQVKEVTQNEGTKTIANNLTSTIQVFTDSEYQLPYVLGSAHQGCLPPFPADVFMIPQYGYLTLNNGSQAVGRSSFYCLEYFPSQMLRTGNNFTFSYTFEEVPFHSSYAHSQSLDRLMNPLIDQYLYYLSRTQTTGGTANTQTLGFSQGGPNTMANQAKNWLPGPCYRQQRVSTTTGQNNNSNFAWTAGTKYHLNGRNSLANPGIAMATHKDDEERFFPSNGILIFGKQNAARDNADYSDVMLTSEEEIKTTNPVATEEYGIVADNLQQQNTAPQIGTVNSQGALPGMVWQNRDVYLQGPIWAKIPHTDGNFHPSPLMGGFGLKHPPPQILIKNTPVPADPPTTFNQSKLNSFITQYSTGQVSVEIEWELQKENSKRWNPEIQYTSNYYKSNNVEFAVNTEGVYSEPRPIGTRYLTRNL

SEQ ID NO: 349 - DNA, 2214 bp, synthetic construct
  misc_feature 1..2214: note = source = /note="Description of Artificial Sequence: Synthetic polynucleotide"
  source 1..2214: mol_type = other DNA
atggctgccgatggttatcttccagattggctcgaggacaaccttagtgaaggaattcgcgagtggtgggctttgaaacctggagcccctcaacccaaggcaaatcaacaacatcaagacaacgctcgaggtcttgtgcttccgggttacaaataccttggacccggcaacggactcgacaagggggagccggtcaacgcagcagacgcggcggccctcgagcacgacaaggcctacgaccagcagctgcaggcgggtgacaatccgtacctgcggtataaccacgccgacgccgagtttcaggagcgtctgcaagaagatacgtcttttgggggcaaccttggcagagcagtcttccaggccaaaaagaggatccttgagcctcttggtctggttgaggaagcagctaaaacggctcctggaaagaagaggcctgtagatcagtctcctcaggaaccggactcatcatctggtgttggcaaatcgggcaaacagcctgccagaaaaagactaaatttcggtcagactggcgactcagagtcagtcccagaccctcaacctctcggagaaccaccagcagcccccacaagtttgggatctaatacaatggcttcaggcggtggcgcaccaatggcagacaataacgagggtgccgatggggtgggtagttcctcgggaaattggcattgcgattcccaatggctgggggacagagtcatcaccaccagcacccgaacctgggccctgcccacctacaacaatcacctctacaagcaaatctccaacgggacatcgggaggagccaccaacgacaacacctacttcggctacagcaccccctgggggtattttgactttaacagattccactgccacttttcaccacgtgactggcagcgactcatcaacaacaactggggattccggcccaagagactcagcttcaagctcttcaacatccaggtcaaggaggtcacgcagaatgaaggcaccaagaccatcgccaataacctcaccagcaccatccaggtgtttacggactcggagtaccagctgccgtacgttctcggctctgcgcaccagggctgcctccctccgttcccggcggacgtgttcatgattccgcaatacggctacctgacgctcaacaatggcagccaagccgtgggacgttcatccttttactgcctggaatatttcccttctcagatgctgagaacgggcaacaactttaccttcagctacacctttgaggaagtgccttttcacagcagctacgcgcacagccagagcttggaccggctgatgaatcctctgattgaccagtacctgtactacttgtctcggactcaaacaacaggaggcacggcaaatacgcagactctgggcttcagccaaggtgggcctaatacaatggccaatcaggcaaagaactggctgccaggaccctgttaccgccaacaacgcgtctcaacgacaaccgggcaaaacaacaatagcaactttgcctggactgctgggaccaaataccatctgaatggaagaaattcattggctaatcctggcatcgctatggcaacacacaaagacgacgaggagcgtttttttcccagtaacgggatcctgatttttggcaaacaaaatgctgccagagacaatgcggattacagcgatgtcatgctcaccagcgaggaagaaatcaaaaccactaaccctgtggctacagaggaatacggtatcgtggcagataacttgcagcagcaaaacacggctcctcaaattggaactgtcaacagccagggggccttacccggtatggtctggcagaaccgggacgtgtacctgcagggtcccatctgggccaagattcctcacacggacggcaacttccacccgtctccgctgatgggcggctttggcctgaaacatcctccgcctcagatcctgatcaagaacacgcctgtacctgcggatcctccgaccaccttcaaccagtcaaagctgaactctttcatcacgcaatacagcaccggacaggtcagcgtggagatcgagtgggagctgcagaaggaaaacagcaagcgctggaacccggagatccagtacacttccaactattacaagtctaataatgttgaatttgctgttaatactgaaggtgtatatagtgaaccccgccccattggcaccagatacctgactcgtaatctgtaa

SEQ ID NO: 350 - protein, 737 aa, synthetic construct; identical to SEQ ID NO: 338
  REGION 1..737: note = source = /note="Description of Artificial Sequence: Synthetic polypeptide"

SEQ ID NO: 351 - DNA, 2211 bp, synthetic construct
  misc_feature 1..2211: note = source = /note="Description of Artificial Sequence: Synthetic polynucleotide"
  source 1..2211: mol_type = other DNA
atggctgccgatggttatcttccagattggctcgaggacaacctctctgagggcattcgcgagtggtgggacttgaaacctggagcccctaaacccaaggcaaatcaacaacatcaggacaacgctcgaggtcttgtgcttccgggttacaaataccttggacccggcaacggactcgacaagggggagccggtcaacgcagcagacgcggcggccctcgagcacgacaaggcctacgaccagcagctcaaggccggagacaacccgtacctcaagtacaaccacgccgacgccgagttccaggagcggctcaaagaagatacgtcttttgggggcaacctcgggcgagcagtcttccaggccaaaaagaggcttcttgaacctcttggtctggttgaggaagcggctaagacggctcctggaaagaagagaccggtagagccatcaccccagcgttctccagactcctctacgggcatcggcaagaaaggccaacagcccgctaaaaagagactcaattttggtcagactggcgactcagagtcagtccccgacccacaacctctcggagaacctccagcaacccccgctgctgtgggacctactacaatggcttcaggcggtggcgcaccaatggcagacaataacgagggtgccgatggagtgggtaattcctcaggaaattggcattgcgattcccaatggctgggcgacagagtcatcaccaccagcaccagaacctgggccctgcccacttacaacaaccatctctacaagcaaatctccagccaatcaggagcttcaaacgacaaccactactttggctacagcaccccttgggggtattttgactttaacagattccactgccacttttcaccacgtgactggcaaagactcatcaacaacaactggggattccgacccaagagactcaacttcaagctcttcaacatccaagtcaaggaggtcacgacgaatgatggcgtcacgaccatcgctaataaccttaccagcacggttcaagtcttctcggactcggagtaccagttgccgtacgtcctcggctctgcgcaccagggctgcctccctccgttcccggcggacgtgttcatgattccgcagtacggctacctaacgctcaacaatggcagccaagccgtgggacgttcatccttttactgcctggaatatttcccttctcagatgctgagaacgggcaacaactttaccttcagctacacttttgaggacgttcctttccacagcagctacgctcacagccagagtctggaccgtctcatgaatcctctcatcgaccagtacctgtattacttgagcagaacaaacactccaagtggaaccaccacgcagtcaaggcttcagttttctcaggccggagcgagtgacattcgggaccagtctaggaactggcttcctggaccctgttaccgccagcagcgcgtttctaaaacaaaaacagacaacaacaacagcaattttacctggactggtgcttcaaaatataaccttaatgggcgtgaatctataatcaaccctggcactgctatggcctcacacaaagacgacgaagacaagttctttcccatgagcggtgtcatgatttttggaaaagagagcgccggagcttcaaacactgcattggacaatgtcatgattacagacgaagaggaaattaaagccactaaccctgtggccaccgaaagatttgggaccgtggcagtcaatttccagagcagcagcacagaccctgcgaccggagatgtgcatgctatgggagcattacctggcatggtgtggcaagatagagacgtgtacctgcagggtcccatttgggccaaaattcctcacacagatggacactttcacccgtctcctcttatgggcggctttggactcaagaacccgcctcctcagatcctcatcaaaaacacgcctgttcctgcgaatcctccggcggagttttcagctacaaagtttgcttcattcatcacccaatactccacaggacaagtgagtgtggaaattgaatgggagctgcagaaagaaaacagcaagcgctggaatcccgaagtgcagtacacatccaattatgcaaaatctgccaacgttgattttactgtggacaacaatggactttatactgagcctcgccccattggcacccgttaccttacccgtcccctgtaa

SEQ ID NO: 352 - protein, 736 aa, synthetic construct
  REGION 1..736: note = source = /note="Description of Artificial Sequence: Synthetic polypeptide"
MAADGYLPDWLEDNLSEGIREWWDLKPGAPKPKANQQHQDNARGLVLPGYKYLGPGNGLDKGEPVNAADAAALEHDKAYDQQLKAGDNPYLKYNHADAEFQERLKEDTSFGGNLGRAVFQAKKRLLEPLGLVEEAAKTAPGKKRPVEPSPQRSPDSSTGIGKKGQQPAKKRLNFGQTGDSESVPDPQPLGEPPATPAAVGPTTMASGGGAPMADNNEGADGVGNSSGNWHCDSQWLGDRVITTSTRTWALPTYNNHLYKQISSQSGASNDNHYFGYSTPWGYFDFNRFHCHFSPRDWQRLINNNWGFRPKRLNFKLFNIQVKEVTTNDGVTTIANNLTSTVQVFSDSEYQLPYVLGSAHQGCLPPFPADVFMIPQYGYLTLNNGSQAVGRSSFYCLEYFPSQMLRTGNNFTFSYTFEDVPFHSSYAHSQSLDRLMNPLIDQYLYYLSRTNTPSGTTTQSRLQFSQAGASDIRDQSRNWLPGPCYRQQRVSKTKTDNNNSNFTWTGASKYNLNGRESIINPGTAMASHKDDEDKFFPMSGVMIFGKESAGASNTALDNVMITDEEEIKATNPVATERFGTVAVNFQSSSTDPATGDVHAMGALPGMVWQDRDVYLQGPIWAKIPHTDGHFHPSPLMGGFGLKNPPPQILIKNTPVPANPPAEFSATKFASFITQYSTGQVSVEIEWELQKENSKRWNPEVQYTSNYAKSANVDFTVDNNGLYTEPRPIGTRYLTRPL

SEQ ID NO: 353 - DNA, 2211 bp, synthetic construct
  misc_feature 1..2211: note = source = /note="Description of Artificial Sequence: Synthetic polynucleotide"
  source 1..2211: mol_type = other DNA
atggctgccgatggttatcttccagattggctcgaggacaaccttagtgaaggaattcgcgagtggtgggcgctgaaacctggagccccgaagcccaaagccaaccagcaaaagcaggacgacggccggggtctggtgcttccgggttacaaatacctcggacccggtaacggactcgacaaaggagagccggtcaacgaggcggacgcggcagccctcgagcacgacaaggcctacgaccagcagctcaaagcgggtgacaatccgtacctgcggtataaccacgccgacgccgagtttcaggagcgtctgcaagaagatacgtcttttgggggcaacctcgggcgagcagtcttccaggccaagaagcgggttctcgaacctctcggtctggttgaggaaggcgctaagacggctcccggaaagaaacgtccggtagagcagtcgccacaagagccagactcctctacgggcatcggcaagaaaggccaacagcccgccagaaaaagactcaatttcggtcagactggcgactcagagtcagttccagaccctcaacctctcggagaacctccagcagcgccctctggtgtgggacctactacaatggcttcaggcggtggcgcaccaatggcagacaataacgaaggcgccgacggagtgggtaatgcctcaggaaattggcattgcgattccacatggctgggcgacagagtcatcaccaccagcacccgaacatgggccttgcccacctataacaaccacctctacaagcaaatctccagtgcttcaacgggggccagcaacgacaacacctacttcggctacagcaccccctgggggtattttgatttcaacagattccactgccatttctcaccacgtgactggcagcgactcatcaacaacaattggggattccggcccaagagactcaacttcaaactcttcaacatccaagtcaaggaggtcacgacgaatgatggcgtcacgaccatcgctaataaccttaccagcacggttcaagtcttctcggactcggagtaccagttgccgtacgtcctcggctctgcgcaccagggctgcctccctccgttcccggcggacgtgttcatgattccgcagtacggctacctaacgctcaacaatggcagccaggcagtgggacggtcatccttttactgcctggaatatttcccatcgcagatgctgagaacgggcaataactttaccttcagctacaccttcgaggacgtgcctttccacagcagctacgcgcacagccagagcctggaccggctgatgaatcctctcatcgaccagtacctgtattacctgaacagaactcagaatcagtccggaagtgcccaaaacaaggacttgctgtttagccgggggtctccagctggcatgtctgttcagcccaaaaactggctacctggaccctgttatcggcagcagcgcgtttctaaaacaaaaacagacaacaacaacagcaattttacctggactggtgcttcaaaatataacctcaatgggcgtgaatccatcatcaaccctggcactgctatggcctcacacaaagacgacgaagacaagttctttcccatgagcggtgtcatgatttttggaaaagagagcgccggagcttcaaacactgcattggacaatgtcatgattacagacgaagaggaaattaaagccactaaccctgtggccaccgaaagatttgggaccgtggcagtcaatttccagagcagcagcacagaccctgcgaccggagatgtgcatgttatgggagccttacctggaatggtgtggcaagacagagacgtatacctgcagggtcctatttgggccaaaattcctcacacagatggacactttcacccgtctcctcttatgggcggctttggactcaagaacccgcctcctcagatcctcatcaaaaacacgcctgttcctgcgaatcctccggcagagttttcggctacaaagtttgcttcattcatcacccagtattccacaggacaagtgagcgtggagattgaatgggagctgcagaaagaaaacagcaaacgctggaatcccgaagtgcagtatacatctaactatgcaaaatctgccaacgttgatttcactgtggacaacaatggactttatactgagcctcgccccattggcacccgttacctcacccgtcccctgtaa

SEQ ID NO: 354 - protein, 736 aa, synthetic construct
  REGION 1..736: note = source = /note="Description of Artificial Sequence: Synthetic polypeptide"
MAADGYLPDWLEDNLSEGIREWWALKPGAPKPKANQQKQDDGRGLVLPGYKYLGPGNGLDKGEPVNEADAAALEHDKAYDQQLKAGDNPYLRYNHADAEFQERLQEDTSFGGNLGRAVFQAKKRVLEPLGLVEEGAKTAPGKKRPVEQSPQEPDSSTGIGKKGQQPARKRLNFGQTGDSESVPDPQPLGEPPAAPSGVGPTTMASGGGAPMADNNEGADGVGNASGNWHCDSTWLGDRVITTSTRTWALPTYNNHLYKQISSASTGASNDNTYFGYSTPWGYFDFNRFHCHFSPRDWQRLINNNWGFRPKRLNFKLFNIQVKEVTTNDGVTTIANNLTSTVQVFSDSEYQLPYVLGSAHQGCLPPFPADVFMIPQYGYLTLNNGSQAVGRSSFYCLEYFPSQMLRTGNNFTFSYTFEDVPFHSSYAHSQSLDRLMNPLIDQYLYYLNRTQNQSGSAQNKDLLFSRGSPAGMSVQPKNWLPGPCYRQQRVSKTKTDNNNSNFTWTGASKYNLNGRESIINPGTAMASHKDDEDKFFPMSGVMIFGKESAGASNTALDNVMITDEEEIKATNPVATERFGTVAVNFQSSSTDPATGDVHVMGALPGMVWQDRDVYLQGPIWAKIPHTDGHFHPSPLMGGFGLKNPPPQILIKNTPVPANPPAEFSATKFASFITQYSTGQVSVEIEWELQKENSKRWNPEVQYTSNYAKSANVDFTVDNNGLYTEPRPIGTRYLTRPL

SEQ ID NO: 355 - DNA, 2205 bp, synthetic construct
  misc_feature 1..2205: note = source = /note="Description of Artificial Sequence: Synthetic polynucleotide"
  source 1..2205: mol_type = other DNA
atggctgctgacggttatcttccagattggctcgaggacaacctttctgaaggcattcgtgagtggtgggctctgaaacctggagtccctcaacccaaagcgaaccaacaacaccaggacaaccgtcggggtcttgtgcttccgggttacaaatacctcggacccggtaacggactcgacaaaggagagccggtcaacgaggcggacgcggcagccctcgaacacgacaaggcctacgaccagcagctcaaggccggagacaacccgtacctcaagtacaaccacgccgacgccgagttccaggagcggctcaaagaagatacgtcttttgggggcaacctcgggcgagcagtcttccaggccaaaaagaggcttcttgaacctcttggtctggttgaggaagcggctaagacggctcctggaaagaagaggcctgtagagcagtctcctcaggaaccggactcctccgcgggtattggcaaatcgggtgcacagcccgctaaaaagagactcaatttcggtcagactggcgacacagagtcagtcccagaccctcaaccaatcggagaacctcccgcagccccctcaggtgtgggatctcttacaatggcttcaggtggtggcgcaccagtggcagacaataacgaaggtgccgatggagtgggtagttcctcgggaaattggcattgcgattcccaatggctgggggacagagtcatcaccaccagcacccgaacctgggccctgcccacctacaacaaccacctctacaaacaaatttccagccaatcaggagcctcgaacgacaatcactactttggctacagcaccccttgggggtattttgacttcaacagattccactgccacttttcaccacgtgactggcagcgactcatcaacaacaactggggattccggcccaagagactcagcttcaagctcttcaacatccaggtcaaagaggttacggacaacaatggagtcaagaccatcgccaataaccttaccagcacggtccaggtcttcacggactcagactatcagctcccgtacgtgctcgggtcggctcacgagggctgcctcccgccgttcccagcggacgttttcatgattcctcagtacgggtatctgacgcttaatgatggaagccaggccgtgggtcgttcgtccttttactgcctggaatatttcccgtcgcaaatgctaagaacgggtaacaacttccagttcagctacgagtttgagaacgtacctttccatagcagctacgctcacagccaaagcctggaccgactaatgaatccactcatcgaccaatacttgtactatctctcaaagactattaacggttctggacagaatcaacaaacgctaaaattcagtgtggccggacccagcaacatggctgtccagggaagaaactacatacctggacccagctaccgacaacaacgtgtctcaaccactgtgactcaaaacaacaacagcgaatttgcttggcctggagcttcttcttgggctctcaatggacgtaatagcttgatgaatcctggacctgctatggccagccacaaagaaggagaggaccgtttctttcctttgtctggatctttaatttttggcaaacaaggaactggaagagacaacgtggatgcggacaaagtcatgataaccaacgaagaagaaattaaaactactaacccggtagcaacggagtcctatggacaagtggccacaaaccaccagagtgcccaagcacaggcgcagaccggctgggttcaaaaccaaggaatacttccgggtatggtttggcaggacagagatgtgtacctgcaaggacccatctgggccaagattcctcacacggacggcaacttccacccgtctccgctgatgggcggctttggcctgaaacatcctccgcctcagatcctgatcaagaacacgcctgtacctgcggatcctccgaccaccttcaaccagtcaaagctgaactctttcatcacgcaatacagcaccggacaggtcagcgtggaaattgaatgggagctgcagaaggaaaacagcaagcgctggaatcccgaagtgcagtatacatctaactatgcaaaatctgccaacgttgatttcactgtggacaacaatggactttatactgagcctcgccccattggcacccgttacctcacccgtcccctgtaa

SEQ ID NO: 356 - protein, 734 aa, synthetic construct
  REGION 1..734: note = source = /note="Description of Artificial Sequence: Synthetic polypeptide"
MAADGYLPDWLEDNLSEGIREWWALKPGVPQPKANQQHQDNRRGLVLPGYKYLGPGNGLDKGEPVNEADAAALEHDKAYDQQLKAGDNPYLKYNHADAEFQERLKEDTSFGGNLGRAVFQAKKRLLEPLGLVEEAAKTAPGKKRPVEQSPQEPDSSAGIGKSGAQPAKKRLNFGQTGDTESVPDPQPIGEPPAAPSGVGSLTMASGGGAPVADNNEGADGVGSSSGNWHCDSQWLGDRVITTSTRTWALPTYNNHLYKQISSQSGASNDNHYFGYSTPWGYFDFNRFHCHFSPRDWQRLINNNWGFRPKRLSFKLFNIQVKEVTDNNGVKTIANNLTSTVQVFTDSDYQLPYVLGSAHEGCLPPFPADVFMIPQYGYLTLNDGSQAVGRSSFYCLEYFPSQMLRTGNNFQFSYEFENVPFHSSYAHSQSLDRLMNPLIDQYLYYLSKTINGSGQNQQTLKFSVAGPSNMAVQGRNYIPGPSYRQQRVSTTVTQNNNSEFAWPGASSWALNGRNSLMNPGPAMASHKEGEDRFFPLSGSLIFGKQGTGRDNVDADKVMITNEEEIKTTNPVATESYGQVATNHQSAQAQAQTGWVQNQGILPGMVWQDRDVYLQGPIWAKIPHTDGNFHPSPLMGGFGLKHPPPQILIKNTPVPADPPTTFNQSKLNSFITQYSTGQVSVEIEWELQKENSKRWNPEVQYTSNYAKSANVDFTVDNNGLYTEPRPIGTRYLTRPL

SEQ ID NO: 357 - DNA, 2211 bp, synthetic construct
  misc_feature 1..2211: note = source = /note="Description of Artificial Sequence: Synthetic polynucleotide"
  source 1..2211: mol_type = other DNA
atggctgccgatggttatcttccagattggctcgaggacaacctctctgagggcattcgcgagtggtgggcgctgaaacctggagccccgaagcccaaagccaaccagcaaaagcaggacgacggccggggtctggtgcttcctggctacaagtacctcggacccttcaacggactcgacaagggggagcccgtcaacgcggcggacgcagcggccctcgagcacgacaaggcctacgaccagcagctgcaggcgggtgacaatccgtacctgcggtataaccacgccgacgccgagtttcaggagcgtctgcaagaagatacgtcttttgggggcaacctcgggcgagcagtcttccaggccaagaagtgggttctcgaacctctcggtctggttgaggaaggcgctaagacggctcctggaaagaaacgtccggtagagcagtcgccacaagagccagactcctcctcgggcatcggcaagacaggccagcagcccgctaaaaagagactcaattttggtcagactggcgactcagagtcagtccccgacccacaacctctcggagaacctccagcaacccccgctgctgtgggacctactacaatggcttcaggcggtggcgcaccaatggcagacaataacgaaggcgccgacggagtgggtaatgcctcaggaaattggcattgcgattccacatggctgggcgacagagtcatcaccaccagcacccgcacctgggccttgcccacctacaataaccacctctacaagcaaatctccagtgcttcaacgggggccagcaacgacaaccactacttcggctacagcaccccctgggggtattttgatttcaacagattccactgccatttctcaccacgtgactggcagcgactcatcaacaacaattggggattccggcccaagagactcaacttcaagctcttcaacatccaagtcaaggaggtcacgacgaatgatggcgtcacaaccatcgctaataaccttaccagcacggttcaagtcttctcggactcggagtaccagcttccgtacgtcctcggctctgcgcaccagggctgcctccctccgttcccggcggacgtgttcatgattccgcaatacggctacctgacgctcaacaatggcagccaagccgtgggacgttcatccttttactgcctggaatatttcccttctcagatgctgagaacgggcaacaactttaccttcagctacacctttgaggaagtgcctttccacagcagctacgcgcacagccagagcctggaccggctgatgaatcctctcatcgaccaatacctgtattacctgaacagaactcaaaatcagtccggaagtgcccaaaacaaggacttgctgtttagccgtgggtctccagctggcatgtctgttcagcccaaaaactggctacctggaccctgttatcggcagcagcgcgtttctaaaacaaaaacagacaacaacaacagcaattttacctggactggtgcttcaaaatataacctcaatgggcgtgaatccatcatcaaccctggcactgctatggcctcacacaaagacgacgaagacaagttctttcccatgagcggtgtcatgatttttggaaaggagagcgccggagcttcaaacactgcattggacaatgtcatgatcaccgacgaagaggaaatcaaagccactaaccccgtggccaccgaaagatttgggactgtggcagtcaatctccagagcagcagcacagaccctgcgaccggagatgtgcatgttatgggagccttacctggcatggtgtggcaagatagagacgtgtacctgcagggtcccatttgggccaaaattcctcacacagatggacactttcacccgtctcctcttatgggcggctttggactcaagaacccgcctcctcagatcctcatcaaaaacacgcctgttcctgcgaatcctccggcggagttttcagctacaaagtttgcttcattcatcacccaatactccacaggacaagtgagtgtggaaattgaatgggagctgcagaaagaaaacagcaagcgctggaatcccgaagtgcagtacacatccaattatgcaaaatctgccaacgttgattttactgtggacaacaatggactttatactgagcctcgccccattggcacccgttacctcacccgtcccctgtaa

SEQ ID NO: 358 - protein, 736 aa, synthetic construct
  REGION 1..736: note = source = /note="Description of Artificial Sequence: Synthetic polypeptide"
MAADGYLPDWLEDNLSEGIREWWALKPGAPKPKANQQKQDDGRGLVLPGYKYLGPFNGLDKGEPVNAADAAALEHDKAYDQQLQAGDNPYLRYNHADAEFQERLQEDTSFGGNLGRAVFQAKKWVLEPLGLVEEGAKTAPGKKRPVEQSPQEPDSSSGIGKTGQQPAKKRLNFGQTGDSESVPDPQPLGEPPATPAAVGPTTMASGGGAPMADNNEGADGVGNASGNWHCDSTWLGDRVITTSTRTWALPTYNNHLYKQISSASTGASNDNHYFGYSTPWGYFDFNRFHCHFSPRDWQRLINNNWGFRPKRLNFKLFNIQVKEVTTNDGVTTIANNLTSTVQVFSDSEYQLPYVLGSAHQGCLPPFPADVFMIPQYGYLTLNNGSQAVGRSSFYCLEYFPSQMLRTGNNFTFSYTFEEVPFHSSYAHSQSLDRLMNPLIDQYLYYLNRTQNQSGSAQNKDLLFSRGSPAGMSVQPKNWLPGPCYRQQRVSKTKTDNNNSNFTWTGASKYNLNGRESIINPGTAMASHKDDEDKFFPMSGVMIFGKESAGASNTALDNVMITDEEEIKATNPVATERFGTVAVNLQSSSTDPATGDVHVMGALPGMVWQDRDVYLQGPIWAKIPHTDGHFHPSPLMGGFGLKNPPPQILIKNTPVPANPPAEFSATKFASFITQYSTGQVSVEIEWELQKENSKRWNPEVQYTSNYAKSANVDFTVDNNGLYTEPRPIGTRYLTRPL

SEQ ID NO: 359 - DNA, 2214 bp, synthetic construct
  misc_feature 1..2214: note = source = /note="Description of Artificial Sequence: Synthetic polynucleotide"
  source 1..2214: mol_type = other DNA
atggctgccgatggttatcttccagattggctcgaggacaaccttagtgaaggaattcgcgagtggtgggctttgaaacctggagcccctcaacccaaggcaaatcaacaacatcaagacaacgctcgaggtcttgtgcttccgggttacaaataccttggacccggcaacggactcgacaagggggagccggtcaacgcagcagacgcggcggccctcgagcacgacaaggcctacgaccagcagctgcaggcgggtgacaatccgtacctgcggtataaccacgccgacgccgagtttcaggagcgtctgcaagaagatacgtcttttgggggcaaccttggcagagcagtcttccaggccaaaaagaggatccttgagcctcttggtctggttgaggaagcagctaaaacggctcctggaaagaagaggcctgtagatcagtctcctcaggaaccggactcatcatctggtgttggcaaatcgggcaaacagcctgccagaaaaagactaaatttcggtcagactggcgactcagagtcagtcccagaccctcaacctctcggagaaccaccagcagcccccacaagtttgggatctaatacaatggcttcaggcggtggcgcaccaatggcagacaataacgagggtgccgatggggtgggtagttcctcgggaaattggcattgcgattcccaatggctgggggacagagtcatcaccaccagcacccgaacctgggccctgcccacctacaacaatcacctctacaagcaaatctccaacgggacatcgggaggagccaccaacgacaacacctacttcggctacagcaccccctgggggtattttgactttaacagattccactgccacttttcaccacgtgactggcagcgactcatcaacaacaactggggattccggcccaagagactcagcttcaagctcttcaacatccaggtcaaggaggtcacgcagaatgaaggcaccaagaccatcgccaataacctcaccagcaccatccaggtgtttacggactcggagtaccagctgccgtacgttctcggctcggcgcaccagggctgcctccctccgttcccggcggacgtcttcatggtgccacagtatggatacctgacgctcaacaatggcagccaagccgtgggacgttcatccttttactgcctggaatatttcccttctcagatgctgagaacgggcaacaactttaccttcagctacacctttgaggaagtgcctttccacagcagctacgcgcacagccagagcttggaccggctgatgaatcctctgattgaccagtacctgtactacttgtctcggactcaaacaacaggaggcacggcaaatacgcagactctgggcttcagccaaggtgggcctaatacaatggccaatcaggcaaagaactggctgccaggaccctgttaccgccaacaacgcgtctcaacgacaaccgggcaaaacaacaatagcaactttgcctggactgctgggaccaaataccatctgaatggaagaaattcattggctaatcctggcatcgctatggcaacacacaaagacgacgaggagcgtttttttcccagtaacgggatcctgatttttggcaaacaaaatgctgccagagacaatgcggattacagcgatgtcatgctcaccagcgaggaagaaatcaaaaccactaaccctgtggctacagaggaatacggtatcgtggcagataacttgcagcagcaaaacacggctcctcaaattggaactgtcaacagccagggggacttacccggtatggtctggcagaaccgggacgtgtacctgcagggtcccatctgggccaagattcctcacacggacggcaacttccacccgtctccgctgatgggcggctttggcctgaaacatcctccgcctcagatcctgatcaagaacacgcctgtacctgcggatcctccgaccaccttcaaccagtcaaagctgaactctttcatcacgcaatacagcaccggacaggtcagcgtggagatcgagtgggagctgcagaaggaaaacagcaagcgctggaacccggagatccagtacacttccaactattacaagtctaataatgttgaatttgctgttaatactgaaggtgtatatagtgaaccccgccccattggcaccagatacctgactcgtaatctgtaa

SEQ ID NO: 360 - protein, 737 aa, synthetic construct
  REGION 1..737: note = source = /note="Description of Artificial Sequence: Synthetic polypeptide"
MAADGYLPDWLEDNLSEGIREWWALKPGAPQPKANQQHQDNARGLVLPGYKYLGPGNGLDKGEPVNAADAAALEHDKAYDQQLQAGDNPYLRYNHADAEFQERLQEDTSFGGNLGRAVFQAKKRILEPLGLVEEAAKTAPGKKRPVDQSPQEPDSSSGVGKSGKQPARKRLNFGQTGDSESVPDPQPLGEPPAAPTSLGSNTMASGGGAPMADNNEGADGVGSSSGNWHCDSQWLGDRVITTSTRTWALPTYNNHLYKQISNGTSGGATNDNTYFGYSTPWGYFDFNRFHCHFSPRDWQRLINNNWGFRPKRLSFKLFNIQVKEVTQNEGTKTIANNLTSTIQVFTDSEYQLPYVLGSAHQGCLPPFPADVFMVPQYGYLTLNNGSQAVGRSSFYCLEYFPSQMLRTGNNFTFSYTFEEVPFHSSYAHSQSLDRLMNPLIDQYLYYLSRTQTTGGTANTQTLGFSQGGPNTMANQAKNWLPGPCYRQQRVSTTTGQNNNSNFAWTAGTKYHLNGRNSLANPGIAMATHKDDEERFFPSNGILIFGKQNAARDNADYSDVMLTSEEEIKTTNPVATEEYGIVADNLQQQNTAPQIGTVNSQGDLPGMVWQNRDVYLQGPIWAKIPHTDGNFHPSPLMGGFGLKHPPPQILIKNTPVPADPPTTFNQSKLNSFITQYSTGQVSVEIEWELQKENSKRWNPEIQYTSNYYKSNNVEFAVNTEGVYSEPRPIGTRYLTRNL

SEQ ID NO: 361 - DNA, 2205 bp, synthetic construct
  misc_feature 1..2205: note = source = /note="Description of Artificial Sequence: Synthetic polynucleotide"
  source 1..2205: mol_type = other DNA
atggctgctgacggttatcttccagattggctcgaggacaacctttctgaaggcattcgtgagtggtgggctctgaaacctggagtccctcaacccaaagcgaaccaacaacaccaggacaactgtcggggtcttgtgcttccgggttacaaatacctcggacccggtaacggactcgacaaaggagagccggtcaacgaggcggacgcggcagccctcgaacacgacaaggcctacgaccagcagctcaaggccggagacaacccgtacctcaagtacaaccacgccgacgccgagttccaggagcggctcaaagaagatacgtcttttgggggcaacctcgggcgagcagtcttccagaccaaaaagaggcttcttgaacctcttggtctggttgaggaagcggctaagacggctcctggaaagaagaggcctgtagagcagtctcctcaggaaccggactcctccgcgggtattggcaaatcgggtgcacagcccgctaaaaagagactcaatttcggtcagactggcgacacagagtcagtcccagaccctcaaccaatcggagaacctcccgcagccccctcaggtgtgggatctcttacaatggcttcaggtggtggcgcaccagtggcagacaataacgaaggtgccgatggagtgggtagttcctcgggaaattggcattgcgattcccaatggctgggggacagagtcatcaccaccagcacccgaacctgggccctgcccacctacaacaaccacctctacaaacaaatttccagccaatcaggagcctcgaacgacaatcactactttggctacagcaccccttgggggtattttgacttcaacagattccactgccacttttcaccacgtgactggcagcgactcatcaacaacaactggggattccggcccaagagactcagcttcaagctcttcaacatccaggtcaaagaggttacggacaacaatggagtcaagaccatcgccaataaccttaccagcacggtccaggtcttcacggactcagactatcagctcccgtacgtgctcgggtcggctcacgagggctgcctcccgccgttcccagcggacgttttcatgattcctcagtacgggtatctgacgcttaatgatggaagccaggccgtgggtcgttcgtccttttactgcctggaatatttcccgtcgcaaatgctaagaacgggtaacaacttccagttcagctacgagtttgagaacgtacctttccatagcagctacgctcacagccaaagcctggaccgactaatgaatccactcatcgaccaatacttgtactatctctcaaagactattaacggttctggacagaatcaacaaacgctaaaattcagtgtggccggacccagcaacatggctgtccagggaagaaactacatacctggacccagctaccgacaacaacgtgtctcaaccactgtgactcaaaacaacaacagcgaatttgcttggcctggagcttcttcttgggctctcaatggacgtaatagcttgatgaatcctggacctgctatggccagccacaaagaaggagaggaccgtttctttcctttgtctggatctttaatttttggcaaacaaggaactggaagagacaacgtggatgcggacaaagtcatgataaccaacgaagaagaaattaaaactactaacccggtagcaacggagtcctatggacaagtggccacaaaccaccagagtgcccaagcacaggcgcagaccggctgggttcaaaaccaaggaatacttccgggtatggtttggcaggacagagatgtgtacctgcaaggacccatctgggccaagattcctcacacggacggcaacttccacccgtctccgctgatgggcggctttggcctgaaacatcctccgcctcagatcctgatcaagaacacgcctgttcctgcgaatcctccggcggagttttcagctacaaagtttgcttcattcatcacccagtactccacaggacaagtgagtgtggaaattgaatgggagctgcagaaagaaaacagcaagcgctggaatcccgaagtgcagtacacatccaattatgcaaaatctgccaacgttgattttactgtggacaacaatggactttatactgagcctcgccccattggcacccgttaccttaccaaacctctgtaa

SEQ ID NO: 362 - protein, 734 aa, synthetic construct
  REGION 1..734: note = source = /note="Description of Artificial Sequence: Synthetic polypeptide"
MAADGYLPDWLEDNLSEGIREWWALKPGVPQPKANQQHQDNCRGLVLPGYKYLGPGNGLDKGEPVNEADAAALEHDKAYDQQLKAGDNPYLKYNHADAEFQERLKEDTSFGGNLGRAVFQTKKRLLEPLGLVEEAAKTAPGKKRPVEQSPQEPDSSAGIGKSGAQPAKKRLNFGQTGDTESVPDPQPIGEPPAAPSGVGSLTMASGGGAPVADNNEGADGVGSSSGNWHCDSQWLGDRVITTSTRTWALPTYNNHLYKQISSQSGASNDNHYFGYSTPWGYFDFNRFHCHFSPRDWQRLINNNWGFRPKRLSFKLFNIQVKEVTDNNGVKTIANNLTSTVQVFTDSDYQLPYVLGSAHEGCLPPFPADVFMIPQYGYLTLNDGSQAVGRSSFYCLEYFPSQMLRTGNNFQFSYEFENVPFHSSYAHSQSLDRLMNPLIDQYLYYLSKTINGSGQNQQTLKFSVAGPSNMAVQGRNYIPGPSYRQQRVSTTVTQNNNSEFAWPGASSWALNGRNSLMNPGPAMASHKEGEDRFFPLSGSLIFGKQGTGRDNVDADKVMITNEEEIKTTNPVATESYGQVATNHQSAQAQAQTGWVQNQGILPGMVWQDRDVYLQGPIWAKIPHTDGNFHPSPLMGGFGLKHPPPQILIKNTPVPANPPAEFSATKFASFITQYSTGQVSVEIEWELQKENSKRWNPEVQYTSNYAKSANVDFTVDNNGLYTEPRPIGTRYLTKPL

SEQ ID NO: 363 - DNA, 2211 bp, synthetic construct
  misc_feature 1..2211: note = source = /note="Description of Artificial Sequence: Synthetic polynucleotide"
  source 1..2211: mol_type = other DNA
atggctgccgatggttatcttccagattggctcgaggacaacctctctgagggcattcgcgagtggtgggacttgaaacctggagcccctaaacccaaggcaaatcaacaacatcaggacaacgctcgaggtcttgtgcttccgggttacaaataccttggacccggcaacggactcgacaagggggagccggtcaacgcagcagacgcggcggccctcgagcacgacaaggcctacgaccagcagctcaaggccggagacaacccgtacctcaagtacaaccacgccgacgccgagttccaggagcggctcaaagaagatacgtcttttgggggcaacctcgggcgagcagtcttccaggccaaaaagaggcttcttgaacctcttggtctggttgaggaagcggctaagacggctcctggaaagaagagaccggtagagccatcaccccagcgttctccagactcctctacgggcatcggcaagaaaggccaacagcccgctaaaaagagactcaattttggtcagactggcgactcagagtcagtccccgacccacaacctctcggagaacctccagcaacccccgctgctgtgggacctactacaatggcttcaggcggtggcgcaccaatggcagacaataacgagggtgccgatggagtgggtaattcctcaggaaattggcattgcgattcccaatggctgggcgacagagtcatcaccaccagcaccagaacctgggccctgcccacttacaacaaccatctctacaagcaaatctccagccaatcaggagcttcaaacgacaaccactactttggctacagcaccccttgggggtattttgactttaacagattccactgccacttttcaccacgtgactggcaaagactcatcaacaacaactggggattccgacccaagagactcaacttcaagctcttcaacatccaagtcaaggaggtcacgacgaatgatggcgtcacgaccatcgctaataaccttaccagcacggttcaagtcttctcggactcggagtaccagttgccgtacgtcctcggctctgcgcaccagggctgcctccctccgttcccggcggacgtgttcatgattccgcagtacggctacctaacgctcaacaatggcagccaagccgtgggacgttcatccttttactgcctggaatatttcccttctcagatgctgagaacgggcaacaactttaccttcagctacacttttgaggacgttcctttccacagcagctacgctcacagccagagtctggaccgtctcatgaatcctctcatcgaccagtacctgtattacttgagcagaacaaacactccaagtggaaccaccacgcagtcaaggcttcagttttctcaggccggagcgagtgacattcgggaccagtctaggaactggcttcctggaccctgttaccgccagcagcgcgtttctaaaacaaaaacagacaacaacaacagcaattttacctggactggtgcttcaaaatataaccttaatgggcgtgaatctataatcaaccctggcactgctatggcctcacacaaagacgacgaagacaagttctttcccatgagcggtgtcatgatttttggaaaagagagcgccggagcttcaaacactgcattggacaatgtcatgatcacagacgaagaggaaatcaaagccactaaccccgtggccaccgaaagatttgggactgtggcagtcaatctccagagcagcagcacagaccctgcgaccggagatgtgcatgttatgggagcattacctggcatggtgtggcaagatagagacgtgtacctgcagggtcccatttgggccaaaattcctcacacagatggacactttcacccgtctcctcttatgggcggctttggactcaagaacccgcctcctcagatcctcatcaaaaacacgcctgttcctgcgaatcctccggcggagttttcagctacaaagtttgcttcattcatcacccaatactccacaggacaagtgagtgtggaaattgaatgggagctgcagaaagaaaacagcaagcgctggaatcccgaagtgcagtacacatccaattatgcaaaatctgccaacgttgattttactgtggacaacaatggactttatactgagcctcgccccattggcacccgttaccttacccgtcccctgtaa

SEQ ID NO: 364 - protein, 736 aa, synthetic construct
  REGION 1..736: note = source = /note="Description of Artificial Sequence: Synthetic polypeptide"
MAADGYLPDWLEDNLSEGIREWWDLKPGAPKPKANQQHQDNARGLVLPGYKYLGPGNGLDKGEPVNAADAAALEHDKAYDQQLKAGDNPYLKYNHADAEFQERLKEDTSFGGNLGRAVFQAKKRLLEPLGLVEEAAKTAPGKKRPVEPSPQRSPDSSTGIGKKGQQPAKKRLNFGQTGDSESVPDPQPLGEPPATPAAVGPTTMASGGGAPMADNNEGADGVGNSSGNWHCDSQWLGDRVITTSTRTWALPTYNNHLYKQISSQSGASNDNHYFGYSTPWGYFDFNRFHCHFSPRDWQRLINNNWGFRPKRLNFKLFNIQVKEVTTNDGVTTIANNLTSTVQVFSDSEYQLPYVLGSAHQGCLPPFPADVFMIPQYGYLTLNNGSQAVGRSSFYCLEYFPSQMLRTGNNFTFSYTFEDVPFHSSYAHSQSLDRLMNPLIDQYLYYLSRTNTPSGTTTQSRLQFSQAGASDIRDQSRNWLPGPCYRQQRVSKTKTDNNNSNFTWTGASKYNLNGRESIINPGTAMASHKDDEDKFFPMSGVMIFGKESAGASNTALDNVMITDEEEIKATNPVATERFGTVAVNLQSSSTDPATGDVHVMGALPGMVWQDRDVYLQGPIWAKIPHTDGHFHPSPLMGGFGLKNPPPQILIKNTPVPANPPAEFSATKFASFITQYSTGQVSVEIEWELQKENSKRWNPEVQYTSNYAKSANVDFTVDNNGLYTEPRPIGTRYLTRPL

SEQ ID NO: 365 - DNA, 2214 bp, synthetic construct; identical to SEQ ID NO: 337
  misc_feature 1..2214: note = source = /note="Description of Artificial Sequence: Synthetic polynucleotide"
  source 1..2214: mol_type = other DNA

SEQ ID NO: 366 - protein, 737 aa, synthetic construct; identical to SEQ ID NO: 338
  REGION 1..737: note = source = /note="Description of Artificial Sequence: Synthetic polypeptide"

SEQ ID NO: 367 - DNA, 2205 bp, synthetic construct
  misc_feature 1..2205: note = source = /note="Description of Artificial Sequence: Synthetic polynucleotide"
  source 1..2205: mol_type = other DNA
atggctgctgacggttatcttccagattggctcgaggacaacctttctgaaggcattcgtgagtggtgggctctgaaacctggagtccctcaacccaaagcgaaccaacaacaccaggacaaccgtcggggtcttgtgcttccgggttacaaatacctcggacccggtaacggactcgacaaaggagagccggtcaacgaggcggacgcggcagccctcgaacacgacaaggcctacgaccagcagctcaaggccggagacaacccgtacctcaagtacaaccacgccgacgccgagttccaggagcggctcaaagaagatacgtcttttgggggcaacctcgggcgagcagtcttccaggccaaaaagaggcttcttgaacctcttggtctggttgaggaagcggctaagacggctcctggaaagaagaggcctgtagagcagtctcctcaggaaccggactcctccgcgggtattggcaaatcgggtgcacagcccgctaaaaagagactcaatttcggtcagactggcgacacagagtcagtcccagaccctcaaccaatcggagaacctcccgcagccccctcaggtgtgggatctcttacaatggcttcaggtggtggcgcaccagtggcagacaataacgaaggtgccgatggagtgggtagttcctcgggaaattggcattgcgattcccaatggctgggggacagagtcatcaccaccagcacccgaacctgggccctgcccacctacaacaaccacctctacaaacaaatttccagccaatcaggagcctcgaacgacaatcactactttggctacagcaccccttgggggtattttgacttcaacagattccactgccacttttcaccacgtgactggcagcgactcatcaacaacaactggggattccggcccaagagactcagcttcaagctcttcaacatccaggtcaaagaggttacggacaacaatggagtcaagaccatcgccaataaccttaccagcacggtccaggtcttcacggactcagactatcagctcccgtacgtgctcgggtcggctcacgagggctgcctcccgccgttcccagcggacgttttcatgattcctcagtacgggtatctgacgcttaatgatggaagccaggccgtgggtcgttcgtccttttactgcctggaatatttcccgtcgcaaatgctaagaacgggtaacaacttccagttcagctacgagtttgagaacgtacctttccatagcagctacgctcacagccaaagcctggaccgactaatgaatccactcatcgaccaatacttgtactatctctcaaagactattaacggttctggacagaatcaacaaacgctaaaattcagtgtggccggacccagcaacatggctgtccagggaagaaactacatacctggacccagctaccgacaacaacgtgtctcaaccactgtgactcaaaacaacaacagcgaatttgcttggcctggagcttcttcttgggctctcaatggacgtaatagcttgatgaatcctggacctgctatggccagccacaaagaaggagaggaccgtttctttcctttgtctggatctttaatttttggcaaacaaggaactggaagagacaacgtggatgcggacaaagtcatgataaccaacgaagaagaaattaaaactactaacccggtagcaacggagtcctatggacaagtggccacaaaccaccagagtgcccaagcacaggcgcagaccggctgggttcaaaaccaaggaatacttccgggtatggtttggcaggacagagatgtgtacctgcaaggacccatttgggccaaaattcctcacacggacggcaactttcacccttctccgctgatgggagggtttggaatgaaacacccgcctcctcagatcctcatcaaaaacacacctgtacctgcggatcctccaacggccttcaacaaggacaagctgaactctttcatcacccagtattctactggccaagtcagcgtggagatcgagtgggagctgcagaaggaaaacagcaagcgctggaaccccgagatccagtacacctccaactactacaaatctacaagtgtggactttgctgttaatacagaaggcgtgtactctgaaccccgccccattggcacccgttacctcacccgtaatctgtaa

SEQ ID NO: 368 - protein, 734 aa, synthetic construct
  REGION 1..734: note = source = /note="Description of Artificial Sequence: Synthetic polypeptide"
MAADGYLPDWLEDNLSEGIREWWALKPGVPQPKANQQHQDNRRGLVLPGYKYLGPGNGLDKGEPVNEADAAALEHDKAYDQQLKAGDNPYLKYNHADAEFQERLKEDTSFGGNLGRAVFQAKKRLLEPLGLVEEAAKTAPGKKRPVEQSPQEPDSSAGIGKSGAQPAKKRLNFGQTGDTESVPDPQPIGEPPAAPSGVGSLTMASGGGAPVADNNEGADGVGSSSGNWHCDSQWLGDRVITTSTRTWALPTYNNHLYKQISSQSGASNDNHYFGYSTPWGYFDFNRFHCHFSPRDWQRLINNNWGFRPKRLSFKLFNIQVKEVTDNNGVKTIANNLTSTVQVFTDSDYQLPYVLGSAHEGCLPPFPADVFMIPQYGYLTLNDGSQAVGRSSFYCLEYFPSQMLRTGNNFQFSYEFENVPFHSSYAHSQSLDRLMNPLIDQYLYYLSKTINGSGQNQQTLKFSVAGPSNMAVQGRNYIPGPSYRQQRVSTTVTQNNNSEFAWPGASSWALNGRNSLMNPGPAMASHKEGEDRFFPLSGSLIFGKQGTGRDNVDADKVMITNEEEIKTTNPVATESYGQVATNHQSAQAQAQTGWVQNQGILPGMVWQDRDVYLQGPIWAKIPHTDGNFHPSPLMGGFGMKHPPPQILIKNTPVPADPPTAFNKDKLNSFITQYSTGQVSVEIEWELQKENSKRWNPEIQYTSNYYKSTSVDFAVNTEGVYSEPRPIGTRYLTRNL

SEQ ID NO: 369 - DNA, 2217 bp, synthetic construct
  misc_feature 1..2217: note = source = /note="Description of Artificial Sequence: Synthetic polynucleotide"
  source 1..2217: mol_type = other DNA
atggctgccgatggttatcttccagattggctcgaggacaacctctctgagggcattcgcgagtggtgggcgctgaaacctggagccccgaagcccaaagccaaccagcaaaagcaggacgacggccggggtctggtgcttcctggctacaagtacctcggacccttcaacggactcgacaagggggagcccgtcaacgcggcggacgcagcggccctcgagcacgacaaggcctacgaccagcagctgcaggcgggtgacaatccgtacctgcggtataaccacgccgacgccgagtttcaggagcgtctgcaagaagatacgtcttttgggggcaacctcgggcgagcagtcttccaggccaagaagcgggttctcgaacctctcggtctggttgaggaaggcgctaagacggctcctggaaagaagagaccggtagagccatcaccccagcgttctccagactcctctacgggcatcggcaagaaaggccaacagcccgccagaaaaagactcaattttggtcagactggcgactcagagtcagttccagaccctcaacctctcggagaacctccagcagcgccctctggtgtgggacctaatacaatggctgcaggcggtggcgcaccaatggcagacaataacgaaggcgccgacggagtgggtagttcctcgggaaattggcattgcgattccacatggctgggcgacagagtcatcaccaccagcacccgaacctgggccctgcccacctacaacaaccacctctacaagcaaatctccaacgggacatcgggaggagccaccaacgacaacacctacttcggctacagcaccccctgggggtattttgactttaacagattccactgccacttttcaccacgtgactggcagcgactcatcaacaacaactggggattccggcccaagagactcagcttcaagctcttcaacatccaggtcaaggaggtcacgcagaatgaaggcaccaagaccatcgccaataacctcaccagcaccatccaggtgtttacggactcggagtaccagctgccgtacgttctcggctctgcccaccagggctgcctgcctccgttcccggcggacgtgttcatgattccccagtacggctacctaacactcaacaacggtagtcaggccgtgggacgctcctccttctactgcctggaatactttccttcgcagatgctgagaaccggcaacaacttccagtttacttacaccttcgaggacgtgcctttccacagcagctacgcccacagccagagcttggaccggctgatgaatcctctgattgaccagtacctgtactacttgtctcggactcaaacaacaggaggcacggcaaatacgcagactctgggcttcagccaaggtgggcctaatacaatggccaatcaggcaaagaactggctgccaggaccctgttaccgccaacaacgcgtctcaacgacaaccgggcaaaacaacaatagcaactttgcctggactgctgggaccaaataccatctgaatggaagaaattcattggctaatcctggcatcgctatggcaacacacaaagacgacgaggagcgtttttttcccagtaacgggatcctgatttttggcaaacaaaatgctgccagagacaatgcggattacagcgatgtcatgctcaccagcgaggaagaaatcaaaaccactaaccctgtggctacagaggaatacggtatcgtggcagataacttgcagcagcaaaacacggctcctcaaattggaactgtcaacagccagggggccttacccggtatggtctggcagaaccgggacgtgtacctgcagggtcccatctgggccaagattcctcacacggacggcaacttccacccctctcccctcatgggtggattcggacttaaacatcctccgcctcagatcctgatcaagaacacgcctgtacctgcggatcctccgaccaccttcaaccagtcaaagctgaactctttcatcacgcaatacagcaccggacaggtcagcgtggaaattgaatgggagctgcagaaggaaaacagcaagcgctggaaccccgagatccagtacacctccaactactacaaatctacaagtgtggactttgctgttaatacagaaggcgtgtactctgaaccccgccccattggcacccgttacctcacccgtaatctgtaa

SEQ ID NO: 370 - protein, 738 aa, synthetic construct; identical to SEQ ID NO: 116
  REGION 1..738: note = source = /note="Description of Artificial Sequence: Synthetic polypeptide"

SEQ ID NO: 371 - DNA, 2211 bp, synthetic construct
  misc_feature 1..2211: note = source = /note="Description of Artificial Sequence: Synthetic polynucleotide"
  source 1..2211: mol_type = other DNA
atggctgctgacggttatcttccagattggctcgaggacaacctttctgaaggcattcgagagtggtgggcgctgcaacctggagcccctaaacccaaggcaaatcaacaacatcaggacaacgctcggggtcttgtgcttccgggttacaaatacctcggacccggcaacggactcgacaagggggaacccgtcaacgcagcggacgcggcagccctcgagcacgacaaggcctacgaccagcagctcaaggccggtgacaacccctacctcaagtacaaccacgccgacgccgagttccaggagcggctcaaagaagatacgtcttttgggggcaacctcgggcgagcagtcttccaggccaaaaagaggcttcttgaacctcttggtctggttgaggaagcggctaagacggctcctggaaagaagaggcctgtagatcagtctcctcaggaaccggactcatcatctggtgttggcaaatcgggcaaacagcctgccagaaaaagactaaatttcggtcagactggcgactcagagtcagtcccagaccctcaacctctcggagaaccaccagcagcccccacaagtttgggatctaatacaatggcttcaggcggtggcgcaccaatggcagacaataacgagggtgccgatggagtgggtaattcctcaggaaattggcattgcgattcccaatggctgggcgacagagtcatcaccaccagcaccagaacctgggccctgcccacttacaacaaccatctctacaagcaaatctccagccaatcaggagcttcaaacgacaaccactactttggctacagcaccccttgggggtattttgactttaacagattccactgccacttctcaccacgtgactggcagcgactcattaacaacaactggggattccggcccaagaaactcagcttcaagctcttcaacatccaagttaaagaggtcacgcagaacgatggcacgacgactattgccaataaccttaccagcacggttcaggtgtttacggactcggagtatcagctcccgtacgtgctcgggtcggcgcaccaaggctgtctcccgccgtttccagcggacgtcttcatggtccctcagtatggatacctcaccctgaacaacggaagtcaagcggtgggacgctcatccttttactgcctggagtacttcccttcgcagatgctaaggactggaaataacttccaattcagctataccttcgaggatgtaccttttcacagcagctacgctcacagccagagtttggatcgcttgatgaatcctcttattgatcagtatctgtactacctgaacagaacgcaaggaacaacctctggaacaaccaaccaatcacggctgctttttagccaggctgggcctcagtctatgtctttgcaggccagaaattggctacctgggccctgctaccggcaacagagactttcaaagactgctaacgacaacaacaacagtaactttccttggacagcggccagcaaatatcatctcaatggccgcgactcgctggtgaatccaggaccagctatggccagtcacaaggacgatgaagaaaaatttttccctatgcacggcaatctaatatttggcaaagaagggacaacggcaagtaacgcagaattagataatgtaatgattacggatgaagaagagattcgtaccaccaatcctgtggcaacagagcagtatggaactgtggcaaataacttgcagagctcaaatacagctcccacgactagaactgtcaatgatcagggggccttacctggcatggtgtggcaagatcgtgacgtgtaccttcaaggacctatctgggcaaagattcctcacacggatggacactttcatccttctcctctgatgggaggctttggactgaaacatccgcctcctcaaatcatgatcaaaaatactccggtaccggcaaatcctccgacgactttcagcccggccaagtttgcttcatttatcactcagtactccactggacaggtcagcgtggaaattgagtgggagctacagaaagaaaacagcaaacgttggaatccagagattcagtacacttccaactacaacaagtctgttaatgtggactttactgtagacactaatggtgtttatagtgaacctcgccccattggcacccgttaccttacccgtcccctgtaa

SEQ ID NO: 372 - protein, 736 aa, synthetic construct; identical to SEQ ID NO: 342
  REGION 1..736: note = source = /note="Description of Artificial Sequence: Synthetic polypeptide"

SEQ ID NO: 373 - DNA, 2211 bp, synthetic construct; identical to SEQ ID NO: 341
  misc_feature 1..2211: note = source = /note="Description of Artificial Sequence: Synthetic polynucleotide"
  source 1..2211: mol_type = other DNA

SEQ ID NO: 374 - protein, 736 aa, synthetic construct; identical to SEQ ID NO: 342
  REGION 1..736: note = source = /note="Description of Artificial Sequence: Synthetic polypeptide"

SEQ ID NO: 375 - DNA, 2211 bp, synthetic construct
  misc_feature 1..2211: note = source = /note="Description of Artificial Sequence: Synthetic polynucleotide"
  source 1..2211: mol_type = other DNA
atggctgctgacggttatcttccagattggctcgaggacaacctttctgaaggcattcgtgagtggtgggctctgaaacctggagtccctcaacccaaagcgaaccaacaacaccaggacaaccgtcggggtcttgtgcttccgggttacaaatacctcggacccggtaacggactcgacaaaggagagcccgtcaacgcggcggatgcagcggccctcgagcacgacaaggcctacgaccagcagctcaaagcgggtgacaatccgtacctgcggtataaccacgccgacgccgagtttcaggagcgtctgcaagaagatacgtcttttgggggcaacctcgggcgagcagtcttccaggccaagaagagggttctcgaaccttttggtctggttgaggaaggtgctaagacggctcctggaaagaaacgtccggtagagcagtcgccacaagagccagactcctcctcgggcatcggcaagacaggccagcagcccgctaaaaagagactcaattttggtcagactggcgactcagagtcagtccccgacccacaacctctcggagaacctccagcaacccccgctgctgtgggacctactacaatggcttcaggcggtggcgcaccaatggcagacaataacgaaggcgccgacggagtgggtaatgcctcaggaaattggcattgcgattccacatggctgggcgacagagtcatcaccaccagcacccgcacctgggccttgcccacctacaataaccacctctacaagcaaatctccagtgcttcaacgggggccagcaacgacaaccactacttcggctacagcaccccctgggggtattttgatttcaacagattccactgccatttctcaccacgtgactggcagcgactcatcaacaacaattggggattccggcccaagagactcaacttcaagctcttcaacatccaagtcaaggaggtcacgacgaatgatggcgtcacgaccatcgctaataaccttaccagcacggttcaagtcttctcggactcggagtaccagcttccgtacgtcctcggctctgcgcaccagggctgcctccctccgttcccggcggacgtgttcatgattccgcaatacggctacctgacgctcaacaatggcagccaagccgtgggacgttcatccttttactgcctggaatatttcccttctcagatgctgagaacgggcaacaactttaccttcagctacacctttgaggaagtgcctttccacagcagctacgcgcacagccagagcctggaccggctgatgaatcctctcatcgaccaatacctgtattacctgaacagaactcaaaatcagtccggaagtgcccaaaacaaggacttgctgtttagccgtgggtctccagctggcatgtctgttcagcccaaaaactggctacctggaccctgttatcggcagcagcgcgtttctaaaacaaaaacagacaacaacaacagcaattttacctggactggtgcttcaaaatataacctcaatgggcgtgaatccatcatcaaccctggcactgctatggcctcacacaaagacgacgaagacaagttctttcccatgagcggtgtcatgatttttggaaaagagagcgccggagcttcaaacactgcattggacaatgtcatgattacagacgaagaggaaattaaagccactaaccctgtggccaccgaaagatttgggaccgtggcagtcaatttccagagcagcagcacagaccctgcgaccggagatgtgcatgttatgggagccttacctggaatggtgtggcaagacagagacgtatacctgcagggtcctatttgggccaaaattcctcacacggatggacactttcacccgtctcctctcatgggcggctttggacttaagcacccgcctcctcagatcctcatcaaaaacacgcctgttcctgcgaatcctccggcagagttttcggctacaaagtttgcttcattcatcacccagtattccacaggacaagtgagcgtggagattgaatgggagctgcagaaagaaaacagcaaacgctggaatcccgaagtgcagtatacatctaactatgcaaaatctgccaacgttgatttcactgtggacaacaatggactttatactgagcctcgccccattggcacccgttacctcacccgtcccctgtaa

SEQ ID NO: 376 - protein, 736 aa, synthetic construct
  REGION 1..736: note = source = /note="Description of Artificial Sequence: Synthetic polypeptide"
MAADGYLPDWLEDNLSEGIREWWALKPGVPQPKANQQHQDNRRGLVLPGYKYLGPGNGLDKGEPVNAADAAALEHDKAYDQQLKAGDNPYLRYNHADAEFQERLQEDTSFGGNLGRAVFQAKKRVLEPFGLVEEGAKTAPGKKRPVEQSPQEPDSSSGIGKTGQQPAKKRLNFGQTGDSESVPDPQPLGEPPATPAAVGPTTMASGGGAPMADNNEGADGVGNASGNWHCDSTWLGDRVITTSTRTWALPTYNNHLYKQISSASTGASNDNHYFGYSTPWGYFDFNRFHCHFSPRDWQRLINNNWGFRPKRLNFKLFNIQVKEVTTNDGVTTIANNLTSTVQVFSDSEYQLPYVLGSAHQGCLPPFPADVFMIPQYGYLTLNNGSQAVGRSSFYCLEYFPSQMLRTGNNFTFSYTFEEVPFHSSYAHSQSLDRLMNPLIDQYLYYLNRTQNQSGSAQNKDLLFSRGSPAGMSVQPKNWLPGPCYRQQRVSKTKTDNNNSNFTWTGASKYNLNGRESIINPGTAMASHKDDEDKFFPMSGVMIFGKESAGASNTALDNVMITDEEEIKATNPVATERFGTVAVNFQSSSTDPATGDVHVMGALPGMVWQDRDVYLQGPIWAKIPHTDGHFHPSPLMGGFGLKHPPPQILIKNTPVPANPPAEFSATKFASFITQYSTGQVSVEIEWELQKENSKRWNPEVQYTSNYAKSANVDFTVDNNGLYTEPRPIGTRYLTRPL

SEQ ID NO: 377 - DNA, 2217 bp, synthetic construct
  misc_feature 1..2217: note = source = /note="Description of Artificial Sequence: Synthetic polynucleotide"
  source 1..2217: mol_type = other DNA
atggctgccgatggttatcttccagattggctcgaggacaacctctctgagggcattcgcgagtggtgggacttgaaacctggagccccgaaacccaaagccaaccagcaaaagcaggacgacggccggggtctggtgcttcctggctacaagtacctcggacccttcaacggactcgacaagggggagcccgtcaacgcggcggatgcaacggccctcgagcacgacaaggcctacgaccagcagctgcaggcgggtgacaatccgtacctgcggtataaccacgccgacgccgagtttcaggagcgtctgcaagaagatacgtcttttgggggcaacctcgggcgagcagtcttccaggccaagaagcgggttctcgaacctctcggtctggttgaggaaggcgctaagacggctcctggaaagaagagaccggtagagccatcaccccagcgttctccagactcctctacgggcatcggcaagaaaggccaacagcccgccagaaaaagactcaattttggtcagactggcgactcagagtcagttccagaccctcaacctctcggagaaccaccagcagcccccacaagtttgggatctaatacaatggcttcaggcggtggcgcaccaatggcagacaataacgagggtgccgatggagtgggtaattcctcaggaaattggcattgcgattcccaatggctgggcgacagagtcatcaccaccagcacccgcacctgggccttgcccacctacaataaccacctctacaagcaaatctccagtgcttcaacgggggccagcaacgacaaccactacttcggctacagcaccccctgggggtattttgactttaaccgcttccactgccacttctcgccaagagactggcaaagactcatcaacaacaattggggattccggcccaagagactcaacttcaaactcttcaacatccaagtcaaggaggtcacgacgaatgatggcgtcacgaccatcgccaataacctcaccagcaccatccaggtgtttacggactcggagtaccagctgccgtacgttctcggctctgcccaccagggctgcctgcctccgttcccggcggacgtgttcatgattccccagtatggatacctcaccctgaacaacggaagtcaagcggtgggacgctcatccttttactgcctggagtacttcccttcgcagatgctaaggactggaaataacttccaattcagctataccttcgaggatgtaccttttcacagcagctacgctcacagccagagtttggatcgcttgatgaatcctcttattgatcagtatctgtactacctgaacagaacgcaaggaacaacctctggaacaaccaaccaatcacggctgctttttagccaggctgggcctcagtctatgtctttgcaggccagaaattggctacctgggccctgctaccggcaacagagactttcaaagactgctaacgacaacaacaacagtaactttccttggacagcagccagcaaatatcatctcaatggccgcgactcgctggtgaatccaggaccagctatggccagtcacaaggacgatgaagaaaaatttttccctatgcacggcaatctaatatttggcaaagaagggacaacggcaagtaacgcagaattagataatgtaatgattacggatgaagaagagattcgtaccaccaatcctgtggcaacagagcagtatggaactgtggcaaataacttgcagagctcaaatacagctcccacgactagaactgtcaatgatcagggggccttacctggcatggtgtggcaagatcgtgacgtgtaccttcaggggcccatctgggcaaagattccacacacggacggacattttcacccctctcccctcatgggtggattcggacttaaacaccctcctccgcagattctcatcaagaacaccccggtacctgcgaatccttcgaccaccttcagtgcggcaaagtttgcttccttcatcacacagtactccacgggacaggtcagcgtggagatcgagtgggagctgcagaaggaaaacagcaagcgctggaacccggagatccagtacacttccaactattacaagtctaataatgttgaatttgctgttaatactgaaggtgtatatagtgaaccccgccccattggcaccagatacctgactcgtaatctgtaa

SEQ ID NO: 378 - protein, 738 aa, synthetic construct
  REGION 1..738: note = source = /note="Description of Artificial Sequence: Synthetic polypeptide"
MAADGYLPDWLEDNLSEGIREWWDLKPGAPKPKANQQKQDDGRGLVLPGYKYLGPFNGLDKGEPVNAADATALEHDKAYDQQLQAGDNPYLRYNHADAEFQERLQEDTSFGGNLGRAVFQAKKRVLEPLGLVEEGAKTAPGKKRPVEPSPQRSPDSSTGIGKKGQQPARKRLNFGQTGDSESVPDPQPLGEPPAAPTSLGSNTMASGGGAPMADNNEGADGVGNSSGNWHCDSQWLGDRVITTSTRTWALPTYNNHLYKQISSASTGASNDNHYFGYSTPWGYFDFNRFHCHFSPRDWQRLINNNWGFRPKRLNFKLFNIQVKEVTTNDGVTTIANNLTSTIQVFTDSEYQLPYVLGSAHQGCLPPFPADVFMIPQYGYLTLNNGSQAVGRSSFYCLEYFPSQMLRTGNNFQFSYTFEDVPFHSSYAHSQSLDRLMNPLIDQYLYYLNRTQGTTSGTTNQSRLLFSQAGPQSMSLQARNWLPGPCYRQQRLSKTANDNNNSNFPWTAASKYHLNGRDSLVNPGPAMASHKDDEEKFFPMHGNLIFGKEGTTASNAELDNVMITDEEEIRTTNPVATEQYGTVANNLQSSNTAPTTRTVNDQGALPGMVWQDRDVYLQGPIWAKIPHTDGHFHPSPLMGGFGLKHPPPQILIKNTPVPANPSTTFSAAKFASFITQYSTGQVSVEIEWELQKENSKRWNPEIQYTSNYYKSNNVEFAVNTEGVYSEPRPIGTRYLTRNL

SEQ ID NO: 379 - DNA, 2208 bp, synthetic construct
  misc_feature 1..2208: note = source = /note="Description of Artificial Sequence: Synthetic polynucleotide"
  source 1..2208: mol_type = other DNA
atggctgccgatggttatcttccagattggctcgaggacaaccttagtgaaggaattcgcgagtggtgggacttgaaacctggagccccgaagcccaaagccaaccagcaaaagcaggacgacggccggggtctggtgcttcctggctacaagtacctcggacccttcaacggactcgacaagggggagcccgtcaacgcggcggacgcagcggccctcgagcacgacaaggcctacgaccagcagctcaaagcgggtgacaatccgtacctgcggtataaccacgccgacgccgagtttcaggagcgtctgcaagaagatacgtcttttgggggcaacctcgggcgagcagtcttccaggccaagaagcgggttctcgaacctctcggtctggttgaggaaggtgctaagacggctcctggaaagaaacgtccggtagagcagtcgccacaagagccagactcctcctcgggcattggcaagacaggccagcagcccgctaaaaagagactcaattttggtcagactggcgactcagagtcagtccccgacccacaacctctcggagaacctccagcaacccccgctgctgtgggacctactacaatggcttcaggcggtggcgcaccaatggcagacaataacgaaggcgccgacggagtgggtaatgcctcaggaaattggcattgcgattccacatggctgggcgacagagtcatcaccaccagcacccgaacctgggccctgcccacctacaacaaccacctctacaaacaaatttccagccaatcaggagcctcgaacgacaatcactactttggctacagcaccccttgggggtattttgatttcaacagattccactgccacttttcaccacgtgactggcagcgactcatcaacaacaattggggattccggcccaagagactcagcttcaagctcttcaacatccaggtcaaggaggtcacgcagaatgaaggcaccaagaccatcgccaataaccttaccagcacggttcaagtgtttacggactcggagtatcagctcccgtacgtgctcggctcggcgcatcaaggatgcctcccgccgttcccagcagacgtcttcatggtgccacagtatggatacctcaccctgaacaacgggagtcaggcagtaggacgctcttcattttactgcctggagtactttccttctcagatgctgcgtaccggaaacaactttaccttcagctacacttttgaggacgttcctttccacagcagctacgctcacagccagagtctggaccgtctcatgaatcctctgattgaccagtacctgtattacttgagcagaacaaacactccaagtggaaccaccacgcagtcaaggcttcagttttctcaggccggagcgagtgacattcgggaccagtctaggaactggcttcctggaccctgttaccgccagcagcgagtatcaaagacatctgcggataacaacaacagtgaatactcgtggactggagctaccaagtaccacctcaatggcagagactctctggtgaatccgggcccggccatggcaagccacaaggactatgaagaaaagttttttcctcagagcggggttctcatctttgggaagcaaggctcagagaaaacaaatgtggacattgaaaaggtcatgattacagacgaagaggaaatcaggacaaccaatcccgtggctacggagcagtatggttctgtatctaccaacctccagagaggcaacagacaagcagctaccgcagatgtcaacacacaaggcgttcttccaggcatggtctggcaggacagagatgtgtaccttcaggggcccatctgggcaaagattccacacacggacggacattttcacccgtctccgctgatgggcggctttggcctgaaacatcctccgcctcagatcctgatcaagaacacgcctgtacctgcggatcctccgaccaccttcaaccagtcaaagctgaactctttcatcactcagtattctactggccaagtcagcgtggagatcgagtgggagctgcagaaggaaaacagcaagcgctggaaccccgagatccagtacacctccaactactacaaatctacaagtgtggactttgctgttaatacagaaggcgtgtactctgaaccccgccccattggcacccgttacctcacccgtaatctgtaa

SEQ ID NO: 380 - protein, 735 aa, synthetic construct
  REGION 1..735: note = source = /note="Description of Artificial Sequence: Synthetic polypeptide"
MAADGYLPDWLEDNLSEGIREWWDLKPGAPKPKANQQKQDDGRGLVLPGYKYLGPFNGLDKGEPVNAADAAALEHDKAYDQQLKAGDNPYLRYNHADAEFQERLQEDTSFGGNLGRAVFQAKKRVLEPLGLVEEGAKTAPGKKRPVEQSPQEPDSSSGIGKTGQQPAKKRLNFGQTGDSESVPDPQPLGEPPATPAAVGPTTMASGGGAPMADNNEGADGVGNASGNWHCDSTWLGDRVITTSTRTWALPTYNNHLYKQISSQSGASNDNHYFGYSTPWGYFDFNRFHCHFSPRDWQRLINNNWGFRPKRLSFKLFNIQVKEVTQNEGTKTIANNLTSTVQVFTDSEYQLPYVLGSAHQGCLPPFPADVFMVPQYGYLTLNNGSQAVGRSSFYCLEYFPSQMLRTGNNFTFSYTFEDVPFHSSYAHSQSLDRLMNPLIDQYLYYLSRTNTPSGTTTQSRLQFSQAGASDIRDQSRNWLPGPCYRQQRVSKTSADNNNSEYSWTGATKYHLNGRDSLVNPGPAMASHKDYEEKFFPQSGVLIFGKQGSEKTNVDIEKVMITDEEEIRTTNPVATEQYGSVSTNLQRGNRQAATADVNTQGVLPGMVWQDRDVYLQGPIWAKIPHTDGHFHPSPLMGGFGLKHPPPQILIKNTPVPADPPTTFNQSKLNSFITQYSTGQVSVEIEWELQKENSKRWNPEIQYTSNYYKSTSVDFAVNTEGVYSEPRPIGTRYLTRNL

SEQ ID NO: 381 - DNA, 2214 bp, synthetic construct
  misc_feature 1..2214: note = source = /note="Description of Artificial Sequence: Synthetic polynucleotide"
  source 1..2214: mol_type = other DNA
atggctgccgatggttatcttccagattggctcgaggacaacctctctgagggcattcgcgagtggtgggacttgaaacctggagccccgaaacccaaagccaaccagcaaaagcaggacgacggccggggtctggtgcttcctggctacaagtacctcggacccttcaacggactcgacaagggggagcccgtcaacgcggcggatgcagcggccctcgagcacgacaaggcctacgaccagcagctcaaagcgggtgacaatccgtacctgcggtataaccacgccgacgccgagtttcaggagcgtctgcaagaagatacgtcttttgggggcaacctcgggcgagcagtcttccaggccaagaagagggttctcgaaccttttggtctggttgaggaaggtgctaagacggctcctggaaagaaacgtccggtagagcagtcgccacaagagccagactcctcctcgggcattggcaagacaggccagcagcctgcaagaaaaagattgaattttggtcagactggagacgcagactcagtacctgacccccagcctctcggacagccaccagcagccccctctggtctgggaactaatacgatggctacaggcagtggcgcaccaatggcagacaataacgagggcgccgacggagtgggtaattcctcgggaaattggcattgcgattcccaatggctgggggacagagtcatcaccaccagcacccgaacctgggccctgcccacctacaacaatcacctctacaagcaaatctccaacagcacatctggaggatcttcaaatgacaacgcctacttcggctacagcaccccctgggggtattttgatttcaacagattccactgccatttctcaccacgtgactggcagcgactcatcaacaacaattggggattccggcccaagagactcaacttcaagctcttcaacatccaggtcaaggaggtcacgcagaatgaaggcaccaagaccatcgccaataacctcaccagcaccatccaggtgtttacggactcggagtaccagctgccgtacgttctcggctctgcccaccagggctgcctgcctccgttcccggcggacgtgttcatgattccccagtacggctacctaacactcaacaacggtagtcaggccgtgggacgctcctccttctactgcctggaatactttccttcgcagatgctgagaaccggcaacaacttccagtttacttacaccttcgaggacgtgcctttccacagcagctacgcccacagccagagcttggaccggctgatgaatcctctgattgaccagtacctgtactacttgtctcggactcaaacaacaggaggcacgacaaatacgcagactctgggcttcagccaaggtgggcctaatacaatggccaatcaggcaaagaactggctgccaggaccctgttaccgccagcagcgagtatcaaagacatttgcggataacaacaacagtgaatactcgtggactggagctaccaagtaccacctcaatggcagagactctctggtgaatccgggcccggccatggcaagccacaaggacgatgaagaaaagttttttcctcagagcggggttctcatctttgggaagcaaggctcagagaaaacaaatgtggacattgaaaaggtcatgattacagacgaagaggaaatcaggacaaccaatcccgtggctacggagcagtatggttctgtatctaccaacctccagagaggcaacagacaagcagctaccgcagatgtcaacacacaaggcgttcttccaggcatggtctggcaggacagagatgtgtaccttcaggggcccatctgggcaaagattccacacacggacggacattttcacccctctcccctcatgggtggattcggacttaaacaccctccgcctcagatcctgatcaagaacacgcctgtacccgcggatcctccgaccaccttcaaccagtcaaagctgaactctttcatcacccagtattctactggccaagtcagcgtggagatcgagtgggagctgcagaaggaaaacagcaagcgctggaaccccgagatccagtacacctccaactactacaaatctacaagtgtggactttgctgttaatacagaaggcgtgtactctgaaccccgccccattggcacccgttacctcacccgtaatctgtaa

SEQ ID NO: 382 - protein, 737 aa, synthetic construct
  REGION 1..737: note = source = /note="Description of Artificial Sequence: Synthetic polypeptide"
MAADGYLPDWLEDNLSEGIREWWDLKPGAPKPKANQQKQDDGRGLVLPGYKYLGPFNGLDKGEPVNAADAAALEHDKAYDQQLKAGDNPYLRYNHADAEFQERLQEDTSFGGNLGRAVFQAKKRVLEPFGLVEEGAKTAPGKKRPVEQSPQEPDSSSGIGKTGQQPARKRLNFGQTGDADSVPDPQPLGQPPAAPSGLGTNTMATGSGAPMADNNEGADGVGNSSGNWHCDSQWLGDRVITTSTRTWALPTYNNHLYKQISNSTSGGSSNDNAYFGYSTPWGYFDFNRFHCHFSPRDWQRLINNNWGFRPKRLNFKLFNIQVKEVTQNEGTKTIANNLTSTIQVFTDSEYQLPYVLGSAHQGCLPPFPADVFMIPQYGYLTLNNGSQAVGRSSFYCLEYFPSQMLRTGNNFQFTYTFEDVPFHSSYAHSQSLDRLMNPLIDQYLYYLSRTQTTGGTTNTQTLGFSQGGPNTMANQAKNWLPGPCYRQQRVSKTFADNNNSEYSWTGATKYHLNGRDSLVNPGPAMASHKDDEEKFFPQSGVLIFGKQGSEKTNVDIEKVMITDEEEIRTTNPVATEQYGSVSTNLQRGNRQAATADVNTQGVLPGMVWQDRDVYLQGPIWAKIPHTDGHFHPSPLMGGFGLKHPPPQILIKNTPVPADPPTTFNQSKLNSFITQYSTGQVSVEIEWELQKENSKRWNPEIQYTSNYYKSTSVDFAVNTEGVYSEPRPIGTRYLTRNL

SEQ ID NO: 383 - DNA, 2217 bp, synthetic construct
  misc_feature 1..2217: note = source = /note="Description of Artificial Sequence: Synthetic polynucleotide"
  source 1..2217: mol_type = other DNA
atggctgccgatggttatcttccagattggctcgaggacactctctctgaaggaataagacagtggtgggcgctgaaacctggagccccgaagcccaaagccaaccagcaaaagcaggacgacggccggggtctggtgcttcctggctacaagtacctcggacccttcaacggactcgacaagggggagcccgtcaacgcggcggatgcagcggccctcgagcacgacaaggcctacgaccagcagctcaaagcgggtgacaatccgtacctgcggtataaccacgccgacgccgagtttcaggagcgtctgcaagaagatacgtcttttgggggcaacctcgggcgagcagtcttccaggccaagaagcgggttctcgaacctctcggtctggttgaggaaggcgctaagacggctcctggaaagaagagaccggtagagccatcaccccagcgttctccagactcctctacgggcatcggcaagaaaggccaacagcccgccagaaaaagactcaattttggtcagactggcgactcagagtcagttccagaccctcaacctctcggagaaccaccagcagcccccacaagtttgggatctaatacaatggcttcaggcggtggcgcaccaatggcagacaataacgagggtgccgatggagtgggtaattcctcaggaaattggcattgcgattcccaatggctgggcgacagagtcatcaccaccagcacccgcacctgggccttgcccacctacaataaccacctctacaagcaaatctccagtgcttcaacgggggccagcaacgacaaccactacttcggctacagcaccccctgggggtattttgactttaaccgcttccactgccacttctcgccaagagactggcaaagactcatcaacaacaattggggattccggcccaagagactcaacttcaaactcttcaacatccaagtcaaggaggtcacgacgaatgatggcgtcacgaccatcgccaataacctcaccagcaccatccaggtgtttacggactcggagtaccagctgccgtacgttctcggctctgcccaccagggctgcctgcctccgttcccggcggacgtgttcatgattccccagtatggatacctcaccctgaacaacggaagtcaagcggtgggacgctcatccttttactgcctggagtacttcccttcgcagatgctaaggactggaaataacttccaattcagctataccttcgaggatgtaccttttcacagcagctacgctcacagccagagtttggatcgcttgatgaatcctcttattgatcagtatctgtactacctgaacagaacgcaaggaacaacctctggaacaaccaaccaatcacggctgctttttagccaggctgggcctcagtctatgtctttgcaggccagaaattggctacctgggccctgctaccggcaacagagactttcaaagactgctaacgacaacaacaacagtaactttccttggacagcagccagcaaatatcatctcaatggccgcgactcgctggtgaatccaggaccagctatggccagtcacaaggacgatgaagaaaaatttttccctatgcacggcaatctaatatttggcaaagaagggacaacggcaagtaacgcagaattagataatgtaatgattacggatgaagaagagattcgtaccaccaatcctgtggcaacagagcagtatggaactgtggcaaataacttgcagagctcaaatacagctcccacgactagaactgtcaatgatcagggggccttacctggcatggtgtggcaagatcgtgacgtgtaccttcaggggcccatctgggcaaagattccacacacggacggacattttcacccctctcccctcatgggtggattcggacttaaacaccctcctccgcagattctcatcaagaacaccccggtacctgcgaatccttcgaccaccttcagtgcggcaaagtttgcttccttcatcacacagtactccacgggacaggtcagcgtggagatcgagtgggagctgcagaaggaaaacagcaagcgctggaacccggagatccagtacacttccaactattacaagtctaataatgttgaatttgctgttaatactgaaggtgtatatagtgaaccccgccccattggcaccagatacctgactcgtaatctgtaa

SEQ ID NO: 384 - protein, 738 aa, synthetic construct
  REGION 1..738: note = source = /note="Description of Artificial Sequence: Synthetic polypeptide"
MAADGYLPDWLEDTLSEGIRQWWALKPGAPKPKANQQKQDDGRGLVLPGYKYLGPFNGLDKGEPVNAADAAALEHDKAYDQQLKAGDNPYLRYNHADAEFQERLQEDTSFGGNLGRAVFQAKKRVLEPLGLVEEGAKTAPGKKRPVEPSPQRSPDSSTGIGKKGQQPARKRLNFGQTGDSESVPDPQPLGEPPAAPTSLGSNTMASGGGAPMADNNEGADGVGNSSGNWHCDSQWLGDRVITTSTRTWALPTYNNHLYKQISSASTGASNDNHYFGYSTPWGYFDFNRFHCHFSPRDWQRLINNNWGFRPKRLNFKLFNIQVKEVTTNDGVTTIANNLTSTIQVFTDSEYQLPYVLGSAHQGCLPPFPADVFMIPQYGYLTLNNGSQAVGRSSFYCLEYFPSQMLRTGNNFQFSYTFEDVPFHSSYAHSQSLDRLMNPLIDQYLYYLNRTQGTTSGTTNQSRLLFSQAGPQSMSLQARNWLPGPCYRQQRLSKTANDNNNSNFPWTAASKYHLNGRDSLVNPGPAMASHKDDEEKFFPMHGNLIFGKEGTTASNAELDNVMITDEEEIRTTNPVATEQYGTVANNLQSSNTAPTTRTVNDQGALPGMVWQDRDVYLQGPIWAKIPHTDGHFHPSPLMGGFGLKHPPPQILIKNTPVPANPSTTFSAAKFASFITQYSTGQVSVEIEWELQKENSKRWNPEIQYTSNYYKSNNVEFAVNTEGVYSEPRPIGTRYLTRNL

SEQ ID NO: 385 - DNA, 2208 bp, synthetic construct; identical to SEQ ID NO: 21
  misc_feature 1..2208: note = source = /note="Description of Artificial Sequence: Synthetic polynucleotide"
  source 1..2208: mol_type = other DNA

SEQ ID NO: 386 - protein, 735 aa, synthetic construct [sequence omitted]

SEQ ID NO: 387 - DNA, 2208 bp, synthetic construct
  misc_feature 1..2208: note = source = /note="Description of Artificial Sequence: Synthetic polynucleotide"
  source 1..2208: mol_type = other DNA
atggctgccgatggttatcttccagattggctcgaggacaacctctctgagggcattcgcgagtggtgggcgctgaaacctggagccccgaagcccaaagccaaccagcaaaagcaggacgacggccggggtctggtgcttcctggctacaagtacctcggacccttcaacggactcgacaagggggagcccgtcaacgcggcggacgccgcggccctcgagcacgacaaggcctacgaccagcagctgcaggcgggtgacaatccgtacctgcggtataaccacgccgacgccgagtttcaggagcgtctgcaagaagatacgtcttttgggggcaacctcgggcgagcagtcttccaggccaaaaagaggcttcttgaacctcttggtctggttgaggaagcagctaaaacggctcctggaaagaagaggcctgtagagcagtctcctcaggaaccggactcctccgcgggtattggcaaatcgggtgcacagcccgccaaaaagagactcaatttcggtcagactggcgactcagagtcagtcccagaccctcaacctctcggagaaccaccagcagcccccacaagtttgggatctaatacaatggcttcaggcggtggcgcaccaatggcagacaataacgaaggcgccgacggagtgggtaatgcctcaggaaattggcattgcgattccacatggctgggcgacagagtcatcaccaccagcacccgcacctgggccttgcccacctacagcaaccatctctacaagcaaatctccagccaatcaggagcttcaaacgacaacgactactttggctacagcaccccttgggggtattttgatttcaacagattccactgccacttttcaccacgtgactggcaaagactcatcaacaacaactggggattccgacccaagagactcaacttcaagctctttaacattcaagtcaaagaggtcacgcagaatgacggtacgacgacgattgccaataaccttaccagcacggttcaggtgtttactgactcggagtaccagctcccgtacgtcctcggctcggcgcatcaaggatgcctcccgccgttcccagcagacgtcttcatggtgccacagtatggatacctcaccctgaacaacgggagtcaggcagtaggacgctcttcattttactgcctggagtactttccttctcagatgctgcgtaccggaaacaactttaccttcagctacacttttgaggacgttcctttccacagcagctacgctcacagccagagtctggaccgtctcatgaatcctctcatcgaccagtacctgtattacttgagcagaacaaacactccaagtggaaccaccacgcagtcaaggcttcagttttctcaggccggagcgagtgacattcgggaccagtctaggaactggcttcctggaccctgttaccgccagcagcgagtatcaaagacatctgaggataacaacaacagtgaatactcgtggactggagctaccaagtaccacctcaatggcagagactctctggtgaatccgggcccggccatggcaagccacaaggacgatgaagaaaagttttttcctcagagcggggttctcatctttgggaagcaaggctcagagaaaacaaatgtggacattgaaaaggtcatgattacagacgaagaggaaatcaggacaaccaatcccgtggctacggagcagtatggttctgtatctaccaacctccagagaggcaacagacaagcagctaccgcagatgtcaacacacaaggcgttcttccaggcatggtctggcaggacagagatgtgtaccttcaggggcccatctgggcaaagattccacacacggacggacattttcacccctctcccctcatgggtggattcggacttaaacaccctcctccacagattctcatcaagaacaccccggtacctgcgaatccttcgaccaccttcagtgcggcaaagtttgcttccttcatcacacagtactccacgggacaggtcagcgtggagatcgagtgggagctgcagaaggaaaacagcaaacgctggaatcccgaaattcagtacacttccaactacaacaagtctgttaatgtggactttactgtggacactaatggcgtgtattcagagcctcgccccattggcaccagatacctgactcgtaatctgtaa

SEQ ID NO: 388 - protein, 735 aa, synthetic construct
  REGION 1..735: note = source = /note="Description of Artificial Sequence: Synthetic polypeptide"
MAADGYLPDWLEDNLSEGIREWWALKPGAPKPKANQQKQDDGRGLVLPGYKYLGPFNGLDKGEPVNAADAAALEHDKAYDQQLQAGDNPYLRYNHADAEFQERLQEDTSFGGNLGRAVFQAKKRLLEPLGLVEEAAKTAPGKKRPVEQSPQEPDSSAGIGKSGAQPAKKRLNFGQTGDSESVPDPQPLGEPPAAPTSLGSNTMASGGGAPMADNNEGADGVGNASGNWHCDSTWLGDRVITTSTRTWALPTYSNHLYKQISSQSGASNDNDYFGYSTPWGYFDFNRFHCHFSPRDWQRLINNNWGFRPKRLNFKLFNIQVKEVTQNDGTTTIANNLTSTVQVFTDSEYQLPYVLGSAHQGCLPPFPADVFMVPQYGYLTLNNGSQAVGRSSFYCLEYFPSQMLRTGNNFTFSYTFEDVPFHSSYAHSQSLDRLMNPLIDQYLYYLSRTNTPSGTTTQSRLQFSQAGASDIRDQSRNWLPGPCYRQQRVSKTSEDNNNSEYSWTGATKYHLNGRDSLVNPGPAMASHKDDEEKFFPQSGVLIFGKQGSEKTNVDIEKVMITDEEEIRTTNPVATEQYGSVSTNLQRGNRQAATADVNTQGVLPGMVWQDRDVYLQGPIWAKIPHTDGHFHPSPLMGGFGLKHPPPQILIKNTPVPANPSTTFSAAKFASFITQYSTGQVSVEIEWELQKENSKRWNPEIQYTSNYNKSVNVDFTVDTNGVYSEPRPIGTRYLTRNL

SEQ ID NO: 389 - DNA, 2208 bp, synthetic construct
  misc_feature 1..2208: note = source = /note="Description of Artificial Sequence: Synthetic polynucleotide"
  source 1..2208: mol_type = other DNA
atggctgccgatggttatcttccagattggctcgaggacaacctctctgagggcattcgcgagtggtgggcgctgaaacctggagccccgaagcccaaagccaaccagcaaaagcaggacgacggccggggtctggtgcttcctggctacaagtacctcggacccttcaacggactcgacaagggggagcccgtcaacgcggcggacgcagcggccctcgagcacgacaaggcctacgaccagcagctgcaggcgggtgacaatccgtacctgcggtataaccacgccgacgccgagttccaggagcgtctgcaagaagatacgtcttttgggggcaacctcgggcgagcagtcttccaggccaagaagagggttctcgaaccttttggtctggttgaggaaggtgctaagacggctcctggaaagaaacgtccggtagagcagtcgccacaagagccagactcctcctcgggcattggcaagacaggccagcagcccgctaaaaagagactcaattttggtcagactggcgactcagagtcagtcccagaccctcaacctctcggagaaccaccagcagcccccacaagtttgggatctaatacaatggcttcaggcggtggcgcaccaatggcagacaataacgagggcgccgacggagtgggtaattcctcgggaaattggcattgcgattccacatggatgggcgacagagtcatcaccaccagcacccgaacctgggccctgcccacctacaacaaccacctctacaaacaaatttccagccaatcaggagcttcaaacgacaaccactactttggctacagcaccccttgggggtattttgactttaacagattccactgccacttttcaccacgtgactggcagcgactcattaacaacaactggggattccggcccaagaaactcaacttcaagctctttaacatccaggtcaaggaggtcacgcagaatgaaggcaccaagaccatcgccaataacctcaccagcaccatccaggtgtttacggactcggagtaccagctgccgtacgttctcggctctgcccaccagggctgcctgcctccgttcccggcggacgtgttcatgattccccagtacggctacctaacactcaacaacggtagtcaggccgtgggacgctcctccttctactgcctggaatactttccttcgcagatgctgagaaccggcaacaacttccagtttacttacaccttcgaggacgtgcctttccacagcagctacgcccacagccagagcttggaccggctgatgaatcctctgattgaccagtacctgtattacttgtctcggactcaaacaacaggaggcacgacaaatacgcagactctgggcttcagccaaggtgggcctaatacaatggccaatcaggcaaagaactggctgcctggaccctgttaccgccagcagcgagtatcaaagacatctgcggataacaacaacagtgaatactcgtggactggagctaccaagtaccacctcaatggcagagactctctggtgaatccgggcccggccatggcaagccacaaggacgatgaagaaaagttttttcctcagagcggggttctcatctttgggaagcaaggctcagagaaaacaaatgtggacattgaaaaggttatgattacagacgaagaggaaatcaggacaaccaatcccgtggctacggagcagtatggttctgtatctaccaacctccagagaggcaacagacaagcagctaccgcagatgtcaacacacagggcgttcttccaggcatggtctggcaggacagagatgtgtaccttcagggtcccatttgggccaaaattcctcacacagatggacactttcacccgtcccctcttatgggcggctttggactcaagaacccgcctcctcagatcctcatcaaaaacacgcctgttcctgcgaatcctccggcagagttttcagctacaaagtttgcttcattcatcacccaatactccacaggacaagtgagtgtggaaattgaatgggagctgcagaaagaaaacagcaagcgctggaatcccgaagtgcagtacacatccaattatgcaaaatctgccaacgttgattttactgtggacactaatggcgtgtattcagagcctcgccccattggcaccagatacctcacccgtaatctgtaa

SEQ ID NO: 390 - protein, 735 aa, synthetic construct
  REGION 1..735: note = source = /note="Description of Artificial Sequence: Synthetic polypeptide"
MAADGYLPDWLEDNLSEGIREWWALKPGAPKPKANQQKQDDGRGLVLPGYKYLGPFNGLDKGEPVNAADAAALEHDKAYDQQLQAGDNPYLRYNHADAEFQERLQEDTSFGGNLGRAVFQAKKRVLEPFGLVEEGAKTAPGKKRPVEQSPQEPDSSSGIGKTGQQPAKKRLNFGQTGDSESVPDPQPLGEPPAAPTSLGSNTMASGGGAPMADNNEGADGVGNSSGNWHCDSTWMGDRVITTSTRTWALPTYNNHLYKQISSQSGASNDNHYFGYSTPWGYFDFNRFHCHFSPRDWQRLINNNWGFRPKKLNFKLFNIQVKEVTQNEGTKTIANNLTSTIQVFTDSEYQLPYVLGSAHQGCLPPFPADVFMIPQYGYLTLNNGSQAVGRSSFYCLEYFPSQMLRTGNNFQFTYTFEDVPFHSSYAHSQSLDRLMNPLIDQYLYYLSRTQTTGGTTNTQTLGFSQGGPNTMANQAKNWLPGPCYRQQRVSKTSADNNNSEYSWTGATKYHLNGRDSLVNPGPAMASHKDDEEKFFPQSGVLIFGKQGSEKTNVDIEKVMITDEEEIRTTNPVATEQYGSVSTNLQRGNRQAATADVNTQGVLPGMVWQDRDVYLQGPIWAKIPHTDGHFHPSPLMGGFGLKNPPPQILIKNTPVPANPPAEFSATKFASFITQYSTGQVSVEIEWELQKENSKRWNPEVQYTSNYAKSANVDFTVDTNGVYSEPRPIGTRYLTRNL

SEQ ID NO: 391 - DNA, 2214 bp, synthetic construct; identical to SEQ ID NO: 381
  misc_feature 1..2214: note = source = /note="Description of Artificial Sequence: Synthetic polynucleotide"
  source 1..2214: mol_type = other DNA

SEQ ID NO: 392 - protein, 737 aa, synthetic construct; identical to SEQ ID NO: 382
  REGION 1..737: note = source = /note="Description of Artificial Sequence: Synthetic polypeptide"

SEQ ID NO: 393 - DNA, 2196 bp, synthetic construct
  misc_feature 1..2196: note = source = /note="Description of Artificial Sequence: Synthetic polynucleotide"
  source 1..2196: mol_type = other DNA
atggctgctgacggttatcttccagattggctcgaggacaacctctctgagggcattcgcgagtggtgggcgctgaaacctggagccccgcaacccaaagccaaccagcaaaagcaggacgacggccggggtctggtgcttcctggctacaagtacctcggacccttcaacggactcgacaagggggagcccgtcaacgaggcggacgccgcggccctcgagcacgacaaggcctacgaccagcagctcaaagcgggtgacaatccgtacctgcggtataatcacgccgacgccgagtttcaagagcgtctgcaagaagatacgtcctttgggggcaacctcgggcgagcagtcttccaggccaaaaagagggtactcgagcctctgggtctggttgaggaaggcgctaagacggctcctggaaagaagcggccagtagaaccggactccagctcgggcatcggcaagtcaggccagcagcccgcgaaaaagagactgaattttgggcagactggcgactcagagtcagtgcctgacccccaacctctctcagaaccacccgcaggtccctctggtctgggatctggtacaatggctgctggcggtggcgctccaatggcagacaataacgaaggcgccgacggagtgggtaatgtctcaggaaattggcattgcgattccacatggctgggcgaccgagtcatcaccaccagcactcggacctgggccctccccacctacaacaaccacctctacaagcaaatctccaacgggacctcgggaggcagcagcaacgacaacacctactttggctacagcaccccctgggggtattttgactttaacagattccactgccacttttcaccacgtgactggcagcgactcatcaacaacaactgggggttccggcccaagaagctcaacttcaagctcttcaacatccaggtcaaggaggtcacccagaatgaaggcaccaagaccatcgccaataacctcaccagcacggtgcaggtctttacggactcggagtaccagctcccgtacgtgctcggctctgcccaccagggctgcctgcctccgttcccggcggacgtgttcatgattccgcagtacgggtacctgacgctgaacaacgggagccaggccgtggggcgatcctccttctactgcctggagtactttccctcgcagatgctgagaacgggcaacaactttaccttcagctacaccttcgaggacgtgcccttccacagcagctacgcgcacagccagagcctggaccggctgatgaacccgctgattgaccagtacctgtactacctgtctcggactcagaccaacgggaccaatgccacgcagactctgttgtttgctcaggccgggcctcagaacatgtcggctcaggccaagaactggctgcctggtccttgctatcggcagcagcgcgtctctacgacagtgtcgcaaaacaacaacagcaactttacctggaccggggcgaccaagtaccacctgaacggccgagactccctggtgagccccggtgtcgccatggcaacgcacaaggacgacgaggagcgcttcttcccgagcagcggggtcctgatgtttggcaagcagggcgctggaaaggacaatgtcgagtacaccaacgtgatgctcaccagcgaggaggagatcaagaccaccaaccctgtggccacggagcagtacggcgtggtggctgacaatctgcagcagaccaactcagctcccattgtgggggcagtcaacagccagggggccttacccggtatggtctggcagaaccgggacgtgtacctgcagggtcccatctgggccaagatcccgcatacggacggcaactttcacccgtctcctctcatgggcggctttggactgaaacacccgcctccccagatcctgatcaaaaacacgccggtacctgcggatcccccggtgaactttacggacgctaagctggcgagtttcatcacgcagtacagcaccgggcaggtcagcgtggagattgagtgggagctgcagaaggagaacagcaagcgctggaatcccgagattcagtacacttccaattattataaatcagctaatgtggactttgccgtcaatgcagatggtgtatatagtgaaccccgccccattggcactcgttacctcacccgtaatctgtaa

SEQ ID NO: 394 - protein, 731 aa, synthetic construct
  REGION 1..731: note = source = /note="Description of Artificial Sequence: Synthetic polypeptide"
MAADGYLPDWLEDNLSEGIREWWALKPGAPQPKANQQKQDDGRGLVLPGYKYLGPFNGLDKGEPVNEADAAALEHDKAYDQQLKAGDNPYLRYNHADAEFQERLQEDTSFGGNLGRAVFQAKKRVLEPLGLVEEGAKTAPGKKRPVEPDSSSGIGKSGQQPAKKRLNFGQTGDSESVPDPQPLSEPPAGPSGLGSGTMAAGGGAPMADNNEGADGVGNVSGNWHCDSTWLGDRVITTSTRTWALPTYNNHLYKQISNGTSGGSSNDNTYFGYSTPWGYFDFNRFHCHFSPRDWQRLINNNWGFRPKKLNFKLFNIQVKEVTQNEGTKTIANNLTSTVQVFTDSEYQLPYVLGSAHQGCLPPFPADVFMIPQYGYLTLNNGSQAVGRSSFYCLEYFPSQMLRTGNNFTFSYTFEDVPFHSSYAHSQSLDRLMNPLIDQYLYYLSRTQTNGTNATQTLLFAQAGPQNMSAQAKNWLPGPCYRQQRVSTTVSQNNNSNFTWTGATKYHLNGRDSLVSPGVAMATHKDDEERFFPSSGVLMFGKQGAGKDNVEYTNVMLTSEEEIKTTNPVATEQYGVVADNLQQTNSAPIVGAVNSQGALPGMVWQNRDVYLQGPIWAKIPHTDGNFHPSPLMGGFGLKHPPPQILIKNTPVPADPPVNFTDAKLASFITQYSTGQVSVEIEWELQKENSKRWNPEIQYTSNYYKSANVDFAVNADGVYSEPRPIGTRYLTRNL

SEQ ID NO: 395 - DNA, 2196 bp, synthetic construct
  misc_feature 1..2196: note = source = /note="Description of Artificial Sequence: Synthetic polynucleotide"
  source 1..2196: mol_type = other DNA
atggctgctgacggttatcttccagattggctcgaggacaacctctctgagggcattcgcgagtggtgggcgctgaaacctggagccccgcaacccaaagccaaccagcaaaagcaggacgacggccggggtctggtgcttcctggctacaagtacctcggacccttcaacggactcgacaagggggagcccgtcaacgaggcggacgccgcggccctcgagcacgacaaggcctacgaccagcagctcaaagcgggtgacaatccgtacctgcggtataatcacgccgacgccgagtttcaagagcgtctgcaagaagatacgtcctttgggggcaacctcgggcgagcagtcttccaggccaaaaagagggtactcgagcctctgggtctggttgaggaaggcgctaagacggctcctggaaagaagcggccagtagaaccggactccagctcgggcatcggcaagtcaggccggcagcccgcgaaaaagagactgaattttgggcagactggcgactcagagtcagtgcctgacccccaacctctctcagaaccacccgcaggtccctctggtctgggatctggtacaatggctgcaggcggtggcgctccaatggcagacaataacgaaggcgccgacggagtgggtaatgcctcaggaaattggcattgcgattccacatggctgggcgaccgagtcatcaccaccagcactcggacctgggccctccccacctacaacaaccacctctacaagcaaatctccaacgggacctcgggaggcagcagcaacgacaacacctactttggctacagcaccccctgggggtattttgactttaacagattccactgccacttttcaccacgtgactggcagcgactcatcaacaacaactggggattccggcccaagaggctcaacttcaagctcttcaacatccaggtcaaggaggtcacccagaatgaaggcaccaagaccatcgccaataacctcaccagcacggtgcaggtctttacggactcgaagtaccagctcccgtacgtgctcggctctgcccaccagggctgcctgcctccgttcccggcggacgtgttcatgattccgcagtacgggtacctgacgctgaacaacgggagccaggccgtggggcgatcctccttctactgcctggagtactttccctcgcagatgctgagaacgggcaacaactttaccttcagctacaccttcgaggacgtgcccttccacagcagctacgcgcacagccagagcctggaccggctgatgaacccgctgattgaccagtacctgtactacctgtctcggactcagaccaacgggaccaatgccacgcagactctgttgtttgctcaggccgggcctcagaacatgtcggctcaggccaagaactggctgcctggtccttgctatcggcagcagcgcgtctctacgacagtgtcgcaaaacaacaacagcaactttacctggaccggggcgaccaagtaccacctgaacggccgagactccctggtgaaccccggtgtcgccatggcaacgcacaaggacgacgaggagcgcttcttcccgagcagcggggtcctgatgtttggcaagcagggcgctggaaaggacaatgtcgagtacaccaacgtgatgctcaccagcgaggaggagatcaagaccaccaaccctgtggccacggagcagtacggtgtggtggctgacaatctgcagcagaccaactcggctcccattgtgggggcagtcaacagccagggggccttacccggtatggtctggcagaaccgggacgtgtacctgcagggtcccatctgggccaagatcccgcatacggacggcaactttcacccgtctcctctcatgggcggctttggactgaaacacccgcctccccagatcctgatcaaaaacacgccggtacctgcggatcccccggtgaactttacggacgctaagctggcgagtttcatcacgcagtacagcaccgggcaggtcagcgtggagattgagtgggagctgcagaaggagaacagcaagcgctggaatcccgagattcagtacacttccaattattataaatcagctaatgtggactttgccgtcaatgcagatggtgtatatagtgaaccccgccccattggcactcgttacctcacccgtaatctgtaa

SEQ ID NO: 396 - protein, 731 aa, synthetic construct
  REGION 1..731: note = source = /note="Description of Artificial Sequence: Synthetic polypeptide"
MAADGYLPDWLEDNLSEGIREWWALKPGAPQPKANQQKQDDGRGLVLPGYKYLGPFNGLDKGEPVNEADAAALEHDKAYDQQLKAGDNPYLRYNHADAEFQERLQEDTSFGGNLGRAVFQAKKRVLEPLGLVEEGAKTAPGKKRPVEPDSSSGIGKSGRQPAKKRLNFGQTGDSESVPDPQPLSEPPAGPSGLGSGTMAAGGGAPMADNNEGADGVGNASGNWHCDSTWLGDRVITTSTRTWALPTYNNHLYKQISNGTSGGSSNDNTYFGYSTPWGYFDFNRFHCHFSPRDWQRLINNNWGFRPKRLNFKLFNIQVKEVTQNEGTKTIANNLTSTVQVFTDSKYQLPYVLGSAHQGCLPPFPADVFMIPQYGYLTLNNGSQAVGRSSFYCLEYFPSQMLRTGNNFTFSYTFEDVPFHSSYAHSQSLDRLMNPLIDQYLYYLSRTQTNGTNATQTLLFAQAGPQNMSAQAKNWLPGPCYRQQRVSTTVSQNNNSNFTWTGATKYHLNGRDSLVNPGVAMATHKDDEERFFPSSGVLMFGKQGAGKDNVEYTNVMLTSEEEIKTTNPVATEQYGVVADNLQQTNSAPIVGAVNSQGALPGMVWQNRDVYLQGPIWAKIPHTDGNFHPSPLMGGFGLKHPPPQILIKNTPVPADPPVNFTDAKLASFITQYSTGQVSVEIEWELQKENSKRWNPEIQYTSNYYKSANVDFAVNADGVYSEPRPIGTRYLTRNL

SEQ ID NO: 397 - DNA, 2196 bp, synthetic construct
  misc_feature 1..2196: note = source = /note="Description of Artificial Sequence: Synthetic polynucleotide"
  source 1..2196: mol_type = other DNA
atggctgctgacggttatcttccagattggctcgaggacaacctctctgagggcattcgcgagtggtgggcgctgaaacctggagccccgcaacccaaagccaaccagcaaaagcaggacgacggccggggtctggtgcttcctggctacaagtacctcggacccttcaacggactcgacaagggggagcccgtcaacgaggcggacgccgcggccctcgagcacgacaaggcctacgaccagcagctcaaagcgggtgacaatccgtacctgcggtataatcacgccgacgccgagtttcaagagcgtctgcaagaagatacgtcctttgggggcaacctcgggcgagcagtcttccaggccaaaaagagggtactcgagcctctgggtctggttgaggaaggcgctaagacggctcctggaaagaagcggccagtagaaccggactccagctcgggcatcggcaagtcaggccagcagcccgcgaaaaagagactgaattttgggccgactggcgactcagagtcagtgcctgacccccaacctctctcagaaccacctgcaggtccctctggtctgggatctggtacaatggctgcaggcggtggcgctccaatggcagacaataacgaaggcgccgacggagtgggtaatgtctcaggaaattggcattgcgattccacatggctgggcgaccgagtcatcaccaccagcactcggacctgggccctccccacctacaacaaccacctctacaagcaaatctccaacgggacctcgggaggcagcagcaacgacaacacctactttggctacagcaccccctgggggtattttgactttaacagattccactgccacttttcaccacgcgactggcagcgactcatcaacaacaactggggattccggcccaagaagctcaacttcaagctcttcaacatccaggtcaaggaggtcacccagaatgaaggcaccaagaccaccgccaataacctcaccagcacggtgcaggtctttacggactcggagtaccagctcccgtacgtgctcggctctgcccaccagggctgcctgcctccgttcccggcggacgtgttcatgattccgcagtacgggtacctgacgctgaacaacgggagccaggccgtggggcgatcctccttctactgcctggagtactttccctcgcagatgctgagaacgggcaacaactttaccttcagctacaccttcgaggacgtgcccttccacagcagctacgcgcacagccagagcctggaccggctgatgaacccgctgattgaccagtacctgtactacctgtctcggactcagaccaacgggaccaatgccacgcagactctgttgtttgctcaggccgggcctcagaacatgtcggctcaggccaagaactggctgcctggtccttgctatcggcagcagcgcgtctctacggcagtgtcgcaaaacaacaacagcaactttacctggaccggggcgaccaagtaccacctgaacggccgagactccctggtgaaccccggtgtcgccatggcaacgcacaaggacgacgaggagcgcttcttcccgagcagcggggtcctgatgtttggcaagcagggcgctggaaaggacaatgtcgagtacaccaacgtgatgctcaccagcgaggaggagatcaagaccaccaaccctgtggccacggagcagtacggtgtggtggctgacaatctgcagcagaccaactcggctcccattgtgggggcagtcaacagccagggggccttacccggtatggtctggcagaaccgggacgtgtacctgcagggtcccatctgggccaagatcccgcatacggacggcaactttcacccgtctcctctcatgggcggctttggactgaaacacccgcctccccagatcctgatcaaaaacacgccggtacctgcggatcccccggtgaactttacggacgctaagctggcgagtttcatcacgcagtacagcaccgggcaggtcagcgtggagattgagtgggagctgcagaaggagaacagcaagcgctggaatcccgagattcagtacacttccaattattataaatcagctaatgtggactttgccgtcaatgcagatggtgtatatagcgaaccccgccccattggcactcgttacctcacccgtaatctgtaa

SEQ ID NO: 398 - protein, 731 aa, synthetic construct
  REGION 1..731: note = source = /note="Description of Artificial Sequence: Synthetic polypeptide"
MAADGYLPDWLEDNLSEGIREWWALKPGAPQPKANQQKQDDGRGLVLPGYKYLGPFNGLDKGEPVNEADAAALEHDKAYDQQLKAGDNPYLRYNHADAEFQERLQEDTSFGGNLGRAVFQAKKRVLEPLGLVEEGAKTAPGKKRPVEPDSSSGIGKSGQQPAKKRLNFGPTGDSESVPDPQPLSEPPAGPSGLGSGTMAAGGGAPMADNNEGADGVGNVSGNWHCDSTWLGDRVITTSTRTWALPTYNNHLYKQISNGTSGGSSNDNTYFGYSTPWGYFDFNRFHCHFSPRDWQRLINNNWGFRPKKLNFKLFNIQVKEVTQNEGTKTTANNLTSTVQVFTDSEYQLPYVLGSAHQGCLPPFPADVFMIPQYGYLTLNNGSQAVGRSSFYCLEYFPSQMLRTGNNFTFSYTFEDVPFHSSYAHSQSLDRLMNPLIDQYLYYLSRTQTNGTNATQTLLFAQAGPQNMSAQAKNWLPGPCYRQQRVSTAVSQNNNSNFTWTGATKYHLNGRDSLVNPGVAMATHKDDEERFFPSSGVLMFGKQGAGKDNVEYTNVMLTSEEEIKTTNPVATEQYGVVADNLQQTNSAPIVGAVNSQGALPGMVWQNRDVYLQGPIWAKIPHTDGNFHPSPLMGGFGLKHPPPQILIKNTPVPADPPVNFTDAKLASFITQYSTGQVSVEIEWELQKENSKRWNPEIQYTSNYYKSANVDFAVNADGVYSEPRPIGTRYLTRNL

SEQ ID NO: 399 - DNA, 4404 bp, synthetic construct
  misc_feature 1..4404: note = source = /note="Description of Artificial Sequence: Synthetic polynucleotide"
  source 1..4404: mol_type = other DNA
atggctgccgatggttatcttccagattggctcgagggcaacctctctgagggcattcgcgagtggtgggacttgaaacctggagccccgaaacccaaagccaaccagcaaaagcaggacgacggccggggtctggtgcttcctggctacaggtacctcggacccttcaacggactcgacaagggagagccggtcaacgaggcagacgccgcggccctcgagcacgacaaggcctacgacaagcagctcgagcagggggacaacccgtacctcaagtacaaccacgccgacgccgagtttcaggagcgtcttcaagaagatacgtcttttgggggcaacctcgggcgagcagtcttccaggccaagaagcgggttctcgaacctctcggtctggttgaggaaggcgctaagacggctcctggaaagaagagacccatagaatcccccgactcctccacgggcatcggcaagaacggccagccgcccgctaaaaagaagctcaactttgggcagactggcgactcagagtcagtgcccgacccccaacctctcggagaacctcccgccgcgccctcaggtctgggatctggtacaatggctgcaggcggtggcgcaccaatggcagacaataacgaaggcgccgacggagtgggtaatgcctccggaaattggcattgcgattccacatggctgggcgacagagtcatcaccaccagcacccgcacctgggccctgcccacctacaacaaccacctctacaagcagatatcaagtcagagcggggctaccaacgacaaccacttcttcggctacagcaccccctggggctattttgacttcaacagattccactgccacttctcaccacgtgactggcagcgactcatcaacaacaactggggattccggcccagaaagctgcggttcaagttgttcaacatccaggtcaaggaggtcacgacgaacgacggcgttacgaccatcgctaataaccttaccagcacgattcaggtcttctcggactcggagtaccaactgccgtacgtcctcggctctgcgcaccagggctgcctccctccgttccctgcggacgtgttcatgattcctcagtacggatatctgactctaaacaacggcagtcagtctgtgggacgttcctccttctactgcctggagtactttccttctcagatgctgagaacgggcgataactttgaattcagctacacctttgaggaagtgcctttccacagcagctatgcgcacagccagagcctggaccggctgatgaatcccctcatcgaccagtacctgtactacctggcccggacccagagcactacggggtccacaagggagctgcagttccatcaggctgggcccaacaccatggccgagcaatcaaagaactggctgcccggaccctgttatcggcagcagagactgtcaaaaaacatagacagcaacaacaacagtaactttgcctggaccggggccactaaataccatctgaatggtagaaattcattaaccaacccgggcgtagccatggccaccaacaaggacgacgaggaccagttctttcccatcaacggagtgctggtttttggcaaaacgggggctgccaacaagacaacgctggaaaacgtgctaatgaccagcgaggaggagatcaaaaccaccaatcccgtggctacagaagaatacggtgtggtctccagcaacctgcaatcgtctacggccggaccccagacacagactgtcaacagccagggggctctgcccggcatggtctggcagaaccgggacgtgtacctgcagggtcccatctgggccaaaattcctcacacggacggcaactttcacccgtctcccctgatgggcggatttggactcaaacacccgcctcctcaaattctcatcaaaaacaccccggtacctgctaatcctccagaggtgtttactcctgccaagtttgcctcatttatcacgcagtacagcaccggccaggtcagcgtggagatcgagtgggaactgcagaaagaaaacagcaaacgctggaatccagagattcagtacacctcaaattatgccaagtctaataatgtggaatttgctgtcaacaacgaaggggtttatactgagcctcgccccattggcacccgttacctcacccgtaacctgtaaatggctgccgatggttatcttccagattggctcgaggacaacctctctgagggcattcgcgagtggtgggacttgaaacctggagccccgaaacccaaagccaaccagcaaaagcaggacgacggccggggtctggtgcttcctggctacaagtacctcggacccttcaacggactcgacaagggggagcccgtcaacgcggcggacgcagcggccctcgagcacgacaaggcctacgaccagcagctcaaagcgggtgacaatccgtacctgcggtataaccacgccgacgccgagtttcaggagcgtctgcaagaagatacgtcttttgggggcaacctcgggcgagcagtcttccaggccaagaagcgggttctcgaacctctcggtctggttgaggaaggcgctaagacggctcctggaaagaagagaccggtagagccatcaccccagcgttctccagactcctctacgggcatcggcaagaaaggccagcagcccgcgaaaaagagactcaactttgggcagactggcgactcagagtcagtgcccgaccctcaaccaatcggagaaccccccgcaggcccctctggtctgggatctggtacaatggctgcaggcggtggcgctccaatggcagacaataacgaaggcgccgacggagtgggtagttcctcaggaaattggcattgcgattccacatggctgggcgacagagtcatcaccaccagcacccgaacctgggccctccccacctacaacaaccacctctacaagcaaatctccaacgggacttcgggaggaagcaccaacgacaacacctacttcggctacagcaccccctgggggtattttgactttaacagattccactgccacttctcaccacgtgactggcagcgactcatcaacaacaactggggattccggcccaagagactcaacttcaagctcttcaacatccaggtcaaggaggtcacgcagaatgaaggcaccaagaccatcgccaataaccttaccagcacgattcaggtctttacggactcggaataccagctcccgtacgtcctcggctctgcgcaccagggctgcctgcctccgttcccggcggacgtcttcatgattcctcagtacgggtacctgactctgaacaatggcagtcaggccgtgggccgttcctccttctactgcctggagtactttccttctcaaatgctgagaacgggcaacaactttgagttcagctaccagtttgaggacgtgccttttcacagcagctacgcgcacagccaaagcctggaccggctgatgaaccccctcatcgaccagtacctgtactacctgtctcggactcagtccacgggaggtaccgcaggaactcagcagttgctattttctcaggccgggcctaataacatgtcggctcaggccaaaaactggctacccgggccctgctaccggcagcaacgcgtctccacgacactgtcgcaaaataacaacagcaactttgcctggaccggtgccaccaagtatcatctgaatggcagagactctctggtaaatcccggtgtcgctatggcaacccacaaggacgacgaagagcgattttttccgtccagcggagtcttaatgtttgggaaacagggagctggaaaagacaacgtggactatagcagcgttatgctaaccagtgaggaagaaattaaaaccaccaacccagtggccacagaacagtacggcgtggtggccgataacctgcaacagcaaaacgccgctcctattgtaggggccgtcaacagtcaaggagccttacctggcatggtctggcagaaccgggacgtgtacctgcagggtcctatctgggccaagattcctcacacggacggaaactttcatccctcgccgctgatgggaggctttggactgaaacacccgcctcctcagatcctgattaagaatacacctgttcccgcggatcctccaactaccttcagtcaagctaagctggcgtcgttcatcacgcagtacagcaccggacaggtcagcgtggaaattgaatgggagctgcagaaagaaaacagcaaacgctggaacccagagattcaatacacttccaactactacaaatctacaaatgtggactttgctgttaacacagatggcacttattctgagcctcgccccatcggcacccgttacctcacccgtaatctgtaa

SEQ ID NO: 400 - protein, 738 aa, synthetic construct; identical to SEQ ID NO: 18
  REGION 1..738: note = source = /note="Description of Artificial Sequence: Synthetic polypeptide"

SEQ ID NO: 401 - DNA, 3129 bp, synthetic construct
  misc_feature 1..3129: note = source = /note="Description of Artificial Sequence: Synthetic polynucleotide"
  source 1..3129: mol_type = other DNA
gaattcgccctttctacggctgcgtcaactggaccaatgagaactttcccttcaacgattgcgtcgacaagatggtgatctggtgggaggagggcaagatgacggccaaggtcgtggagtccgccaaggccattctcggcggcagcaaagtgcgcgtggaccaaaagtgcaagtcgtccgcccagatcgaccccacccccgtgatcgtcacctccaacaccaacatgtgcgccgtgattgacgggaacagcaccaccttcgagcaccagcagccgttgcaggaccggatgttcaagtttgaactcacccgccgtctggagcacgactttggcaaggtgacaaagcaggaagtcagagagttcttccgctgggcgcaggatcacgtgaccgaggtggcgcacgagttctacgtcagaaagggtggagccaacaagagacccgcccccgatgacgcggataaaagcgagcccaagcgggcctgcccctcagtcgcggatccatcgacgtcagacgcggaaggagctccggtggactttgccgacaggtaccaaaacaaatgttctcgtcacgcgggcatgcttcagatgctgtttccctgcaaaacatgcgagagaatgaatcagaatttcaacatttgcttcacgcacgggaccagagactgttcagaatgtttccccggcgtgtcagaatctcaaccggtcgtcagaaaaaagacgtatcggaaactctgtgcgattcatcatctgctgggggcgggcacccgagattgcttgctcggcctgcgatctggtcaacgtggacctagatgactgtgtttctgagcaataaatgacttaaaccaggtatggctgccgatggttatcttccagattggctcgaggacaacctctctgagggcattcgcgagtggtgggacttgaaacctggagccccgaaacccaaagccaaccagcaaaagcaggacgacggccggggtctggtgcttcctggctacaagtacctcggacccttcaacggactcgacaagggggagcccgtcaacgcggcggacgcagcggccctcgagcacgacaaggcctacgaccagcagctcaaagcgggtgacaatccgtacctgcggtataaccacgccgacgccgagtttcaggagcgtctgcaagaagatacgtcttttgggggcaacctcgggcgagcagtcttccaggccaagaagcgggttctcgaacctctcggtctggttgaggaaggcgctaagacggctcctggaaagaagagaccggtagagccatcaccccagcgttctccagactcctctacgggcatcggcaagaaaggccagcagcccgcgaaaaagagactcaactttgggcagactggcgactcagagtcagtgcccgaccctcaaccaatcggagaaccccccgcaggcccctctggtctgggatctggtacaatggctgcaggcggtggcgctccaatggcagacaataacgaaggcgccgacggagtgggtagttcctcaggaaattggcattgcgattccacatggctgggcgacagagtcatcaccaccagcacccgaacctgggccctccccacctacaacaaccacctctacaagcaaatctccaacgggacttcgggaggaagcaccaacgacaacacctacttcggctacagcaccccctgggggtattttgactttaacagattccactgccacttctcaccacgtgactggcagcgactcatcaacaacaactggggattccggcccaagagactcaacttcaagctcttcaacatccaggtcaaggaggtcacgcagaatgaaggcaccaagaccatcgccaataaccttaccagcacgattcaggtctttacggactcggaataccagctcccgtacgtcctcggctctgcgcaccagggctgcctgcctccgttcccggcggacgtcttcatgattcctcagtacgggtacctgactctgaacaatggcagtcaggccgtgggccgttcctccttctactgcctggagtactttccttctcaaatgctgagaacgggcaacaactttgagttcagctaccagtttgaggacgtgccttttcacagcagctacgcgcacagccaaagcctggaccggctgatgaaccccctcatcgaccagtacctgtactacctgtctcggactcagtccacgggaggtaccgcaggaactcagcagttgctattttctcaggccgggcctaataacatgtcggctcaggccaaaaactggctacccgggccctgctaccggcagcaacgcgtctccacgacactgtcgcaaaataacaacagcaactttgcctggaccggtgccaccaagtatcatctgaatggcagagactctctggtaaatcccggtgtcgctatggcaacccacaaggacgacgaagagcgattttttccgtccagcggagtcttaatgtttgggaaacagggagctggaaaagacaacgtggactatagcagcgttatgctaaccagtgaggaagaaattaaaaccaccaacccagtggccacagaacagtacggcgtggtggccgataacctgcaacagcaaaacgccgctcctattgtaggggccgtcaacagtcaaggagccttacctggcatggtctggcagaaccgggacgtgtacctgcagggtcctatctgggccaagattcctcacacggacggaaactttcatccctcgccgctgatgggaggctttggactgaaacacccgcctcctcagatcctgattaagaatacacctgttcccgcggatcctccaactaccttcagtcaagctaagctggcgtcgttcatcacgcagtacagcaccggacaggtcagcgtggaaattgaatgggagctgcagaaagaaaacagcaaacgctggaacccagagattcaatacacttccaactactacaaatctacaaatgtggactttgctgttaacacagatggcacttattctgagcctcgccccatcggcacccgttacctcacccgtaatctgtaattgcttgttaatcaataaaccggttgattcgtttcagttgaactttggtctctgcgaagggcgaattc

SEQ ID NO: 402 - protein, 738 aa, synthetic construct; identical to SEQ ID NO: 18
  REGION 1..738: note = source = /note="Description of Artificial Sequence: Synthetic polypeptide"

SEQ ID NO: 403 - protein, 733 aa, synthetic construct
  REGION 1..733: note = source = /note="Description of Artificial Sequence: Synthetic polypeptide"
MAADGYLPDWLEDNLSEGIREWWDLRPGAPKPKANQQKQDDGRGLVLPGYKYLGPFNGLDKGEPVNEADAAALEHDKAYDKQLEQGDNPYLKYNHADAEFQERLQEDTSFGGNLGRAVFQAKKRVLEPLGLVEEGAKTAPGKKRPIESPDSSTGIGKKGQQPAKKRLNFGQTGDSESVPDPQPIGEPPAGPSGLGSGTMAAGGGAPMADNNEGADGVGSSSGNWHCDSTWLGDRVITTSTRTWALPTYNNHLYKQISNGTSGGSTNDNTYFGYSTPWGYFDFNRFHCHFSPRDWQRLINNNWGFRPKRLNFKLFNIQVKEVTQNEGTKTIANNLTSTIQVFTDSEYQLPYVLGSAHQGCLPPFPADVFMIPQYGYLTLNNGSQAVGRSSFYCLEYFPSQMLRTGNNFEFSYQFEDVPFHSSYAHSQSLDRLMNPLIDQYLYYLSRTQSTGGTAGTQQLLFSQAGPNNMSAQAKNWLPGPCYRQQRVSTTVSQNNNSNFAWTGATKYHLNGRDSLVNPGVAMATHKGDEERFFPSSGVLMFGKQGAGKDNVDYSSVMLTSEEEIKTTNPVATEQYGVVADNLQQQNAAPIVGAVNSQGALPGMVWQNRDVYLQGPIWAKIPHTDGNFHPSPLMGGFGLKHPPPQILIKNTPVPADPPTTFSQAKLASFITQYSTGQVSVEIEWELQKENSKRWNPEIQYTSNYYKSTNVDFAVNTEGTYSEPRPIGTRYLTRNL

SEQ ID NO: 404 - DNA, 2501 bp, synthetic construct
  misc_feature 1..2501: note = source = /note="Description of Artificial Sequence: Synthetic polynucleotide"
  source 1..2501: mol_type = other DNA
gaattcgcccttggctgcgtcaactggaccaatgagaactttcccttcaacgattgcgtcgacaagatggtgatctggtgggaggagggcaagatgacggccaaggtcgtggagtccgccaaggccattcatcatctgctggggcgggctcccgagattgcttgctcggcctgcgatctggtcaacgtggacctggatgactgtgtttctgagcaataaatgacttaaaccaggtatggctgccgatggttatcttccagattggctcgaggacaacctctctgagggcattcgcgagtggtgggacttgagacctggagccccgaaacccaaagccaaccagcaaaagcaggacgacggccggggtctggtgcttcctggctacaagtacctcggacccttcaacggactcgacaagggagagccggtcaacgaggcagacgccgcggccctcgagcacgacaaggcctacgacaagcagctcgagcagggggacaacccgtacctcaagtacaaccacgccgacgccgagtttcaggagcgtcttcaagaagatacgtcttttgggggcaacctcgggcgagcagtcttccaggccaagaagcgggttctcgaacctctcggtctggttgaggaaggcgctaagacggctcctggaaagaagagacccatagaatcccccgactcctccacgggcatcggcaagaaaggccagcagcccgctaaaaagagactcaactttgggcagactggcgactcagagtcagtgcccgaccctcaaccaatcggagaaccccccgcaggcccctctggtctgggatctggcacaatggctgcaggcggtggcgctccaatggcagacaataacgaaggcgccgacggagtgggtagttcctcaggaaattggcattgcgattccacatggctgggcgacagagtcatcaccaccagcacccgaacctgggccctccccacctacaacaaccacctctacaagcaaatctccaacgggacatcgggaggaagcaccaacgacaacacctacttcggctacagcaccccctgggggtattttgactttaacagattccactgccacttctcaccacgtgactggcagcgactcatcaacaacaactggggattccggcccaagagactcaacttcaagctcttcaacatccaggtcaaggaggtcacgcagaatgaaggcaccaagaccatcgccaataaccttaccagcacgattcaggtctttacggactcggaataccagctcccgtacgtcctcggctctgcgcaccagggctgcctgcctccgttcccggcggacgtcttcatgattcctcagtacgggtacctgactctgaacaacggcagtcaggccgtgggccgttcctccttctactgcctggagtactttccttctcaaatgctgagaacgggcaacaactttgagttcagctaccagtttgaggacgtgccttttcacagcagctatgcgcacagccaaagcctggaccggctgatgaaccccctcatcgaccagtacctgtactacctgtctcggactcagtccacgggaggtaccgcaggaactcagcagttgctattttctcaggccgggcctaataacatgtcggctcaggccaaaaactggctacccgggccctgctaccggcagcaacgcgtctccacgacagtgtcgcaaaataacaacagcaactttgcttggaccggtgccaccaagtatcatctgaatggcagagactctctggtaaatcccggtgtcgctatggcaacgcacaagggcgacgaagagcgattttttccatccagcggagtcttgatgtttgggaaacagggagctggaaaagacaacgtagactatagcagcgttatgctaaccagtgaggaagaaatcaaaaccaccaacccagtggccacagaacagtacggcgtggtggccgataacctgcaacagcaaaacgccgctcctattgtaggggccgtcaacagtcaaggagccttacctggcatggtctggcagaaccgggacgtgtacctgcagggtcctatctgggccaagattcctcacacggacggcaactttcatccttcgccgctgatgggaggctttggactgaaacacccgcctcctcagatcctgattaagaatacacctgttcccgcggatcctccaactaccttcagtcaagccaagctggcgtcgttcatcacgcagtacagcaccggacaggtcagcgtggaaattgaatgggagctgcagaaagagaacagcaagcgctggaacccagagattcagtatacttccaactactacaaatctacaaatgtggactttgctgtcaatactgagggtacttattcagagcctcgccccattggcacccgttacctcacccgtaacctgtaattgcctgttaatcaataaaccggttgattcgtttcagttgaactttggtctcaagggcgaattc

SEQ ID NO: 405 - DNA, 2187 bp, synthetic construct
  misc_feature 1..2187: note = source = /note="Description of Artificial Sequence: Synthetic polynucleotide"
  source 1..2187: mol_type = other DNA
atggctgccgatggttatcttccagattggctcgaggacaacctctctgagggcattcgcgagtggtgggacttgaaacctggagccccgaaacccaaagccaaccagcaaaagcaggacgacggccggggtctggtgcttcctggctacaagtacctcggacccttcaacggactcgacaagggagagccggtcaacgaggcagacgccgcggccctcgagcacgacaaggcctacgacaagcagctcgagcagggggacaacccgtacctcaagtacaaccacgccgacgccgagtttcaggagcgtcttcaagaagatacgtcttttgggggcaacctcgggcgagcagtcttccaggccaagaagcgggttctcgaacctctcggtctggttgaggaaggcgctaagacggctcctggaaagaagagacccatagaatcccccgactcctccacgggcatcggcaagaaaggccagcagcccgctaaaaagaagctcaactttgggcagactggcgactcagagtcagtgcccgacccccaacctctcggagaacctcccgccgcgccctcaggtctgggatctggtacaatggctgcaggcggtggcgcaccaatggcagacaataacgaaggcgccgacggagtgggtaatgcctccggaaattggcattgcgattccacatggctgggcgacagagtcatcaccaccagcacccgcacctgggccctgcccacctacaacaaccacctctacaagcagatatcaagtcagagcggggctaccaacgacaaccacttcttcggctacagcaccccctggggctattttgacttcaacagattccactgccacttctcaccacgtgactggcagcgactcatcaacaacaactggggattccggcccagaaagctgcggttcaagttgttcaacatccaggtcaaggaggtcacgacgaacgacggcgttacgaccatcgctaataaccttaccagcacgattcaggtcttctcggactcggagtaccaactgccgtacgtcctcggctctgcgcaccagggctgcctccctccgttccctgcggacgtgttcatgattcctcagtacggatatctgactctaaacaacggcagtcagtctgtgggacgttcctccttctactgcctggagtactttccttctcagatgctgagaacgggcaataactttgaattcagctacacctttgaggaagtgcctttccacagcagctatgcgcacagccagagcctggaccggctgatgaatcccctcatcgaccagtacctgtactacctggcccggacccagagcactacggggtccacaagggagctgcagttccatcaggctgggcccaacaccatggccgagcaatcaaagaactggctgcccggaccctgttatcggcagcagagactgtcaaaaaacatagacagcaacaacaacagtaactttgcctggaccggggccactaaataccatctgaatggtagaaattcattaaccaacccgggcgtagccatggccaccaacaaggacgacgaggaccagttctttcccatcaacggagtgctggtttttggcgaaacgggggctgccaacaagacaacgctggaaaacgtgctaatgaccagcgaggaggagatcaaaaccaccaatcccgtggctacagaagaatacggtgtggtctccagcaacctgcaatcgtctacggccggaccccagacacagactgtcaacagccagggggctctgcccggcatggtctggcagaaccgggacgtgtacctgcagggtcccatctgggccaaaattcctcacacggacggcaactttcacccgtctcccctgatgggcggatttggactcaaacacccgcctcctcaaattctcatcaaaaacaccccggtacctgctaatcctccagaggtgtttactcctgccaagtttgcctcatttatcacgcagtacagcaccggccaggtcagcgtggagatcgagtgggaactgcagaaagaaaacagcaaacgctggaatccagagattcagtacacctcaaattatgccaagtctaataatgtggaatttgctgtcaacaacgaaggggtttatactgagcctcgccccattggcacccgttacctcacccgtaacctgtaa

SEQ ID NO: 406 - protein, 728 aa, synthetic construct; identical to SEQ ID NO: 74
  REGION 1..728: note = source = /note="Description of Artificial Sequence: Synthetic polypeptide"

SEQ ID NO: 407 - protein, 728 aa, synthetic construct; identical to SEQ ID NO: 166
  REGION 1..728: note = source = /note="Description of Artificial Sequence: Synthetic polypeptide"

SEQ ID NO: 408 - protein, 728 aa, synthetic construct; identical to SEQ ID NO: 166
  REGION 1..728: note = source = /note="Description of Artificial Sequence: Synthetic polypeptide"

SEQ ID NO: 409 - protein, 733 aa, synthetic construct
  REGION 1..733: note = source = /note="Description of Artificial Sequence: Synthetic polypeptide"
MAADGHLPDWLEDNLSEGIREWWDLKPGAPKPKANQQKQDDGRGLVLPGYKYLGPFNGLDKGEPVNAADAAALEHDKAYDQQLKAGDNPYLRYNHADAEFQERLQEDTSFGGNLGRAVFQAKKRVLEPLGLVEEGAKTAPGKKRPIESPDSSTGIGKKGQQPAKKKLNFGQTGDSESVPDPQPIGEPPAGPSGLGSGTMAAGGGAPMADNNEGADGVGSSSGNWHCDSTWLGDRVITTSTRTWALPTYNNHLYKQISNGTSGGSTNDNTYFGYSTPWGYFDFNRFHCHFSPRDWQRLINNSWGFRPKRLNFKLFNIQVKEVTQNEGTKTIANNLTSTIQVFTDSEYQLPYVLGSAHQGCLPPFPADVFMIPQYGYLTLNNGSQAVGRSSFYCLEYFPSQMLRTGNNFEFSYQFEDVPFHSSYAHSQSLDRLMNPLIDQYLYYLSRTQSTGGTAGTQQLLFSQAGPNNMSAQAKNWLPGPCYRQQRVSTTLSQNNNSNFAWTGATKYHLNGRDSLVNPGVAMATHKDDEERFFPSSGVLMFGKQGAGKDNVDYSSVMLTSEEEIKTTNPVATEQYGVVADNLQQQNAAPIVGAVNSQGALPGMVWQNRDVYLQGPIWAKIPHTDGNFHPSPLMGGFGLKHPPPQILIKNTPVPADPPTTFSQAKLASFITQYSTGQVSVEIEWELQKENSKRWNPEIQYTSNYYKSTNVDFAVNTEGTYSEPRPIGTRYLTRNL

SEQ ID NO: 410 - DNA, 3113 bp, synthetic construct
  misc_feature 1..3113: note = source = /note="Description of Artificial Sequence: Synthetic polynucleotide"
  source 1..3113: mol_type = other DNA
gaattcgccctttctacggctgcgtcaactggaccaatgagaactttcccttcaacgattgcgtcgacaagatggtgatctggtgggaggagggcaagatgacggccaaggtcgtggagtccgccaaggccattctcggcggcagcaaggtgcgcgtggaccaaaagtgcaagtcgtccgcccagatcgatcccacccccgtgatcgtcacttccaacaccaacatgtgcgccgtgattgacgggaacagcaccaccttcgagcaccagcagccgttacaagaccggatgttcaaatttgaactcacccgccgtctggagcatgactttggcaaggtgacaaagcaggaagtcaaagagttcttccgctgggcgcaggatcacgtgaccgaggtggcgcatgagttctacgtcagaaagggtggagccaacaagagacccgcccccgatgacgcggataaaagcgagcccaagcgggcctgcccctcagtcgcggatccatcgacgtcagacgcggaaggagctccggtggactttgccgacaggtaccaaaacaaatgttctcgtcacgcgggcatgcttcagatgctgcttccctgcaagacatgcgagagaatgaatcagaatttcagcatttgcttcacgcacgggaccagagactgttcagaatgtttccccggcgtgtcagaatctcaaccggtcgtcagaaagaggacgtatcggaaactctgtgccattcatcatctgctggggcgggctcccgagattgcttgctcggcctgcgatctggtcaacgtggacctggatgactgtgtttctgagcaataaatgacttaaaccaggtatggctgccgatggtcatcttccagattggctcgaggacaacctctctgagggcattcgcgagtggtgggacttgaaacctggagccccgaaacccaaagccaaccagcaaaagcaggacgacggccggggtctggtgcttcctggctacaagtacctcggacccttcaacggactcgacaagggggagcccgtcaacgcggcggacgcagcggccctcgagcacgacaaggcctacgaccagcagctcaaagcgggtgacaatccgtacctgcggtataaccacgccgacgccgagtttcaggagcgtcttcaagaagatacgtcttttgggggcaacctcgggcgagcagtcttccaggccaagaagcgggttctcgaacctctcggtctggttgaggaaggcgctaagacggctcctggaaagaagagacccatagaatcccccgactcctccacgggcatcggcaagaaaggccagcagcccgctaaaaagaagctcaactttgggcagactggcgactcagagtcagtgcccgaccctcaaccaatcggagaaccccccgcaggcccctctggtctgggatctggtacaatggctgcaggcggtggcgctccaatggcagacaataacgaaggcgccgacggagtgggtagttcctcaggaaattggcattgcgattccacatagctgggcgacagagtcatcaccaccagcacccgaacctgggccctccccacctacaacaaccacctctacaagcaaatctccaacgggacatcgggaggaagcaccaacgacaacacctacttcggctacagcaccccctgggggtattttgactttaacagattccactgccacttctcaccacgtgactggcagcgactcatcaacaacagctggggattccggcccaagagactcaacttcaagctcttcaacatccaggtcaaggaggtcacgcagaatgaaggcaccaagaccatcgccaataaccttaccagcacgattcaggtctttacggactcggaataccagctcccgtacgtcctcggctctgcgcaccagggctgcctgcctccgttcccggcggacgtcttcatgattcctcagtacgggtacctgactctgaacaacggcagtcaggccgtgggccgttcctccttctactgcctggagtactttccttctcaaatgctgagaacgggcaacaactttgagttcagctaccagtttgaggacgtgccttttcacagcagctacgcgcacagccaaagcctggaccggctgatgaaccccctcatcgaccagtacctgtactacctgtctcggactcagtccacgggaggtaccgcaggaactcagcagttgctattttctcaggccgggcctaataacatgtcggctcaggccaaaaactggctacccgggccctgctaccggcagcaacgcgtctccacgacactgtcgcaaaataacaacagcaactttgcttggaccggtgccaccaagtatcatctgaatggcagagactctctggtaaatcccggtgtcgctatggcaacgcacaaggacgacgaagagcgattttttccatccagcggagtcttgatgtttgggaaacagggagctggaaaagacaacgtggactatagcagcgttatgctaaccagtgaggaagaaatcaaaaccaccaacccagtggccacagaacagtacggcgtggtggccgataacctgcaacagcaaaacgccgctcctattgtaggggccgtcaacagtcaaggagccttacctggcatggtctggcagaaccgggacgtgtacctgcagggtcctatctgggccaagattcctcacacggacggcaactttcatccttcgccgctgatgggaggctttggactgaaacacccgcctcctcagatcctgattaagaatacacctgttcccgcggatcctccaactaccttcagtcaagccaagctggcgtcgttcatcacgcagtacagcaccggacaggtcagcgtggaaattgaatgggagctgcagaaagagaacagcaagcgctggaacccagagattcagtatacttccaactactacaaatctacaaatgtggactttgctgtcaatactgagggtacttattcagagcctcgccccattggcacccgttacctcacccgtaacctgtaattgcctgttaatcaataaaccggttaattcgtttcagttgaactttggtctctgcgaagggcgaattc

SEQ ID NO: 411 - protein, 731 aa, synthetic construct
  REGION 1..731: note = source = /note="Description of Artificial Sequence: Synthetic polypeptide"
MAADGYLPDWLEDNLSEGIREWWDLKPGAPKPKANQQKQDDGRGLVLPGYKYLGPFNGLDKGEPVNEADAAALEHDKAYDKQLEQGDNPYLKYNHADAEFQERLQEDTSFGGNLGRAVFRAKKRVLEPLGLVEEGAKTAPGKKRPIESPDSSTGIGKKGQQPAKKKLNFGQTGDSESVPDPQPLGEPPAAPSGLGSGTMAAGGGAPMADNNEGADGVGNASGNWHCDSTWLGDRVITTSTRTWALPTYNNHLYKQISSQSGATNDNHFFGYSTPWGYFDFNRFHCHFSPRDWQRLINNNRGFRPRKLRFKLFNIQVKEVTTNDGVTTIANNLTSTIQVFSDSEYQLPYVLGSAHQGCLPPFPADVFMIPQYGYLTLNNGSQSVGRSSFYCLEYFPSQMLRTGNNFEFSYQFEDVPFHSSYAHSQSLDRLMNPLIDQYLYYLSRTQSTGGTAGTQQLLFSQAGPNNMSAQAKNWLPGPCYRQQRVSTTLSQNNNSNFAWTGATKYHLNGRDSLVNPGVAMATHKDDEERFFPSSGVLMFGKQGAGKDNVDYSSVMLTSEEEIKTTNPVATEQYGVVADNLQQQNAAPIVGAVNSQGALPGMAWQNRDVYLQGPIWAKIPHTDGNFHPSPLMGGFGLKHPPPQILIKNTPVPADPPTTFSQAKLASFITQYSTGQVSVEIEWELQKENSKRWNPEIQYTSNYYKSTNVDFAVNTEGTYSEPRPIGTRYLTRNL

SEQ ID NO: 412 - DNA, 3106 bp, synthetic construct
  misc_feature 1..3106: note = source = /note="Description of Artificial Sequence: Synthetic polynucleotide"
  source 1..3106: mol_type = other DNA
gaattcgcccttctacggctgcgtcaactggaccaatgagaactttcccttcaacgattgcgtcgacaagatggtgatctggtgggaggagggcaagatgacggccaaggtcgtggagtccgccaaggccattctcggcggcagcaaggtgcgcgtggaccaaaagtgcaagtcgtccgcccagatcgaccccacccccgtgatcgtcacctccaacaccaacatgtgcgccgtgattgacgggaacagcaccaccttcgagcaccagcagccgttgcaggaccggatgttcaaatttgaactcacccgccgtctggagcatgactttggcaaggcgacaaagcaggaagtcaaagagttcttccgctgggcgcaggatcacgtgaccgaggtggcgcatgagttctacgtcagaaagggtggagccaacaagagacccgcccccgatgacgcggataaaagcgagcccaagcgggcccgcccctcagtcgcggatccatcgacgtcagacgcggaaggagctccggtggactttgccgacaggtaccaaaacaaatgttctcgtcacgcgggcatgcttcagatgctgtttccctgcaaaacatgcgagagaatgaatcagaatttcaacatttgcttcacgcacgggaccagagactgttcagaatgtttccccggcgtgtcagaatctcaaccggtcgtcagaaagaggacgtatcggaaactctgtgccattcatcatctgctggggcgggctcccgagattgcttgctcggcctgcgatctggtcaacgtggacctggatgactgtgtttctgagcaataaatgacttaaaccaggtatggctgccgatggttatcttccagattggctcgaggacaacctctctgagggcattcgcgagtggtgggacttgaaacctggagccccgaaacccaaagccaaccagcaaaagcaggacgacggccggggtctggtgcttcctggctacaagtacctcggacccttcaacggactcgacaagggagagccggtcaacgaggcagacgccgcggccctcgagcacgacaaggcctacgacaagcagctcgagcagggggacaacccgtacctcaagtacaaccacgccgacgccgagtttcaggagcgtcttcaagaagatacgtcttttgggggcaacctcgggcgagcagtcttccgggccaagaagcgggttctcgaacctctcggtctggttgaggaaggcgctaagacggctcctggaaagaagagacccatagaatcccccgactcctccacgggcatcggcaagaaaggccagcagcccgctaaaaagaagctcaactttgggcagactggcgactcagagtcagtgcccgacccccaacctctcggagaacctcccgccgcgccctcaggtctgggatctggtacaatggctgcaggcggtggcgcaccaatggcagacaataacgaaggcgccgacggagtgggtaatgcctccggaaattggcattgcgattccacatggctgggcgacagagtcatcaccaccagcacccgcacctgggccctgcccacctacaacaaccacctctacaagcagatatcaagtcagagcggggctaccaacgacaaccacttcttcggctacagcaccccctggggctattttgacttcaacagattccactgccacttctcaccacgtgactggcagcgactcatcaacaacaaccggggattccggcccagaaagctgcggttcaagttgttcaacatccaggtcaaggaggtcacgacgaacgacggcgttacgaccatcgctaataaccttaccagcacgattcaggtcttctcggactcggagtaccaactgccgtacgtcctcggctctgcgcaccagggctgcctccctccgttccctgcggacgtgttcatgattcctcagtacggatatctgactctaaacaacggcagtcagtctgtgggacgttcctccttctactgcctggagtactttccttctcagatgctgagaacgggcaataactttgaattcagctaccagtttgaggacgtgccctttcacagcagctacgcgcacagccaaagcctggaccggctgatgaaccccctcatcgaccagtacctgtactacctgtctcggactcagtccacgggaggtaccgcaggaactcagcagttgctattttctcaggccgggcctaataacatgtcggctcaggccaaaaactggctacccgggccctgctaccggcagcaacgcgtctccacgacactgtcgcaaaataacaacagcaactttgcttggaccggtgccaccaagtatcatctgaatggcagagactctctggtaaatcccggtgtcgctatggcaacgcacaaggacgacgaagagcgattttttccatccagcggagtcttgatgtttgggaaacagggagctggaaaagacaacgtggactatagcagcgttatgctaaccagtgaggaagaaatcaaaaccaccaacccagtggccacagaacagtacggcgtggtggccgataacctgcaacagcaaaacgccgctcctattgtaggggccgtcaacagtcaaggagccttacctggcatggcctggcagaaccgggacgtgtacctgcagggtcctatctgggccaagattcctcacacggacggcaactttcatccttcgccgctgatgggaggctttggactgaaacacccgcctcctcagatcctgattaagaatacacctgttcccgcggatcctccaactaccttcagtcaagccaagctggcgtcgttcatcacgcagtacagcaccggacaggtcagcgtggaaattgaatgggagctgcagaaagagaacagcaagcgctggaacccagagattcagtatacttccaactactacaaatctacaaatgtggactttgctgtcaatactgagggtacttattcagagcctcgccccattggcacccgttacctcacccgtaacctgtaattgcctgttaatcaataaaccggttaattcgtttcagttgaactttggtctctgcgaagggcgaattc

SEQ ID NO: 413 - protein, 738 aa, synthetic construct
  REGION 1..738: note = source = /note="Description of Artificial Sequence: Synthetic polypeptide"
MAADGYLPDWLEDNLSEGIREWWDLKPGAPKPKANQQKQDDGRGLVLPGYKYLGPFNGLDKGEPVNEADAAALEHDKAYDKQLEQGDNPYLKYNHADAEFQERLQEDTSFGGNLGRAVFQAKKRVLEPLGLVEEGAKTAPGKKRPVEPSPQRSPDSSTGIGKTGQQPAKKRLNFGQTGDSESVPDPQPIGEPPAGPSGLGSGTMAAGGGAPMADNNEGADGVGSSSGNWHCDSTWLGDRVITTSTRTWALPTYNNHLYKQISNGTSGGSTNDNTYFGYSTPWGYFDFNRFHCHFSPRDWQRLINNNWGFRPKRLNFKLFNIQVKEVTQNEGTKTIANNLTSTIQVFTDSEYQLPYVLGSAHQGCLPPFPADVFMIPQYGYLTLNNGSQAVGRSSFYCLEYFPSQMLRTGNNFEFSYQFEDVPFHSSYAHSQSLDRLMNPLIDQYLYYLSRTQSTGGTAGTQQLLFSQAGPNNMSAQAKNWLPGPCYRQQRVSTTLSQNNNSNFAWTGATKYHLNGRDSLVNPGVAMATHKDDEERFFPSSGVLMFGKQGAGKDNVDYSSVMLTSEEEIKTTNPVATEQYGVVADNLQQQNAAPIVGAVNSQGALPGMVWQNRDVYLQGPIWAKIPHTDGNFHPSPLMGGFGLKHPPPQILIKNTPVPADPPTTFSQAKLASFITQYSTGQVSVEIEWELQKENSKRWNPEIQYTSNYYKSTNVDFAVNTEGTYSEPRPIGTRYLTRNL

SEQ ID NO: 414 - DNA, 3197 bp, synthetic construct
  misc_feature 1..3197: note = source = /note="Description of Artificial Sequence: Synthetic polynucleotide"
  source 1..3197: mol_type = other DNA
gaattcgccctttctacggctgcgtcaactggaccaatgagaactttcccttcaacgattgcgtcgacaagatggtgatctggtgggaggagggcaagatgacggccaaggtcgtggagtccgccaaggccattctcggcggcagcaaggtgcgcgtggaccaaaagtgcaagtcgtccgcccagatcgaccccacccccgtgatcgtcacctccaacaccaacatgtgcgccgtgattgacgggaacagcaccaccttcgagcaccagcagccgttacaagaccggatgttcaaatttgaactcacccgccgtctggagcacgactttggcaaggtgacaaagcaggaagtcaaagagttcttccgctgggcgcaggatcacgtgaccgaggtggcgcatgagttctacgtcagaaagggtggagccaacaagagacccgcccccgatgacgcggataaaagcgagcccaagcgggcctgcccctcagtcgcggatccatcgacgtcagacgcggaaggagctccggtggactttgccgacaggtaccaaaacaaatgttctcgtcacgcgggcatgcttcagatgctgtttccctgcaagacatgcgagagaatgaatcagaatttcaacatttgcttcacgcacgggaccagagactgttcagaatgtttccccggcgtgtcagaatctcaaccggtcgtcagaaagaggacgtatcggaaactctgtgccattcatcatctgctggggcgggctcccgagattgcttgctcggcctgcgatctggtcaacgtggacctggatgactgtgtttctgagcaataaatgacttaaaccaggtatggctgccgatggttatcttccagattggctcgaggacaacctctctgagggcattcgcgagtggtgggacttgaaacctggagccccgaaacccaaagccaaccagcaaaagcaggacgacggccggggtctggtgcttcctggctacaagtacctcggacccttcaacggactcgacaagggagagccggtcaacgaggcagacgccgcggccctcgagcacgacaaggcctacgacaagcagctcgagcagggggacaacccgtacctcaagtacaaccacgccgacgccgagtttcaggagcgtcttcaagaagatacgtcttttgggggcaacctcgggcgagcagtcttccaggccaagaagcgggttctcgaacctctcggtctggttgaggaaggcgctaagacggctcctggaaagaagagaccggtagagccatcaccccagcgttctccagactcctctacgggcatcggcaagacaggccagcagcccgcgaaaaagagactcaactttgggcagactggcgactcagagtcagtgcccgaccctcaaccaatcggagaaccccccgcaggcccctctggtctgggatctggtacaatggctgcaggcggtggcgctccaatggcagacaataacgaaggcgccgacggagtgggtagttcctcaggaaattggcattgcgattccacatggctgggcgacagagtcatcaccaccagcacccgaacctgggccctccccacctacaacaaccacctctacaagcaaatctccaacgggacatcgggaggaagcaccaacgacaacacctacttcggctacagcaccccctgggggtattttgactttaacagattccactgccacttctcaccacgtgactggcagcgactcatcaacaacaactggggattccggcccaagagactcaacttcaagctcttcaacatccaggtcaaggaggtcacgcagaatgaaggcaccaagaccatcgccaataaccttaccagcacgattcaggtctttacggactcggaataccagctcccgtacgtcctcggctctgcgcaccagggctgcctgcctccgttcccggcggacgtcttcatgattcctcagtacgggtacctgactctgaacaacggcagtcaggccgtgggccgttcctccttctactgcctggagtactttccttctcaaatgctgagaacgggcaacaactttgagttcagctaccagtttgaggacgtgccttttcacagcagctacgcgcacagccaaagcctggaccggctgatgaaccccctcatcgaccagtacctgtactacctgtctcggactcagtccacgggaggtaccgcaggaactcagcagttgctattttctcaggccgggcctaataacatgtcggctcaggccaaaaactggctacccgggccctgctaccggcagcaacgcgtctccacgacactgtcgcaaaataacaacagcaactttgcttggaccggtgccaccaagtatcatctgaatggcagagactctctggtaaatcccggtgtcgctatggcaacgcacaaggacgacgaagagcgattttttccatccagcggagtcttgatgtttgggaaacagggagctggaaaagacaacgtggactatagcagcgttatgctaaccagtgaggaagaaatcaaaaccaccaacccagtggccacagaacagtacggcgtggtggccgataacctgcaacagcaaaacgccgctcctattgtaggggccgtcaacagtcaaggagccttacctggcatggtctggcagaaccgggacgtgtacctgcagggtcctatctgggccaagattcctcacacggacggcaactttcatccttcgccgctgatgggaggctttggactgaaacacccgcctcctcagatcctgattaagaatacacctgttcccgcggatcctccaactaccttcagtcaagccaagctggcgtcgttcatcacgcagtacagcaccggacaggtcagcgtggaaattgaatgggagctgcagaaagagaacagcaagcgctggaacccagagattcagtatacttccaactactacaaatctacaaatgtggactttgctgtcaatactgagggtacttattcagagcctcgccccattggcacccgttacctcacccgtaacctgtaattgcctgttaatcaataaaccggttaattcgtttcagttgaactttggtctctgcgaagggcgaattcgtttaaacctgcaggactagtccctttagtgagggttaattctgagcttggcgtaatcatgggtcatag

SEQ ID NO: 415 - protein, 735 aa, synthetic construct
  REGION 1..735: note = source = /note="Description of Artificial Sequence: Synthetic polypeptide"
MAADGYLPDWLEDNLSEGIREWWDLKPGAPKPKANQQKQDDGRGLVLPGYKYLGPFNGLDKGEPVNEADAAALEHDKAYDKQLEQGDNPYLKYNHADAEFQERLQEDTSFGGNLGRAVFQAKKRVLEPLGLVEEGAKTAPGKKRPVEPSPQRSPDSSTGIGKTGQQPAKKRLNFGQTGDSESVPDPQPIGEPPAGPSGLGSGTMAAGGGAPMADNNEGADGVGSSSGNWHCDSTWLGDRVITTSTRTWALPTYNNHLYKQISNGTSGGSTNDNTYFGYSTPWGYFDFNRFHCHFSPRDWQRLINNNWGFRPRKLRFKLFNIQVKEVTTDDGVTTIANNLTSTIQVFSDSEYQLPYVLGSAHQGCLPPFPADVFMIPQYGYLTLNNGSQSVGRSSFYCLEYFPSQMLRTGNNFEFSYTFEEVPFHSSYAHSQSLDRLMNPLIDQYLYYLARTQSTTGSTRELQFHQAGPNTMAEQSKNWLPGPCYRQQRLSKNIDSNNNSNFAWTGATKYHLNGRNSLTNPGVAMATNKDDEDQFFPINGVLVFGKTGAANKTTLENVLMTSEEEIKTTNPVATEEYGVVSSNLQSSTAGPQTQTVNSQGALPGMVWQNRDVYLQGPIWAKIPHTDGNFHPSPLMDGFGLKHPPPQILIKNTPVPANPPEVFTPAKFASFITQYSTGQVSVEIEWELQKENSKRWNPEIQYTSNYAKSNNVEFAVNNEGVYTEPRPIGTRYLTRNL

SEQ ID NO: 416 - DNA, 3276 bp, synthetic construct
  misc_feature 1..3276: note = source = /note="Description of Artificial Sequence: Synthetic polynucleotide"
  source 1..3276: mol_type = other DNA
gaattcgcccttcgcagagaccaaagttcaactgaaacgaattaaccggtttattgattaacaggcaattacaggttacgggtgaggtaacgggtgccaatggggcgaggctcagtataaaccccttcgttgttgacagcaaattccacattattagacttggcataatttgaggtgtactgaatctctggattccagcgtttgctgttttctttctgcagttcccactcgatctccacgctgacctggccggtgctgtactgcgtgataaatgaggcaaacttggcaggagtaaacacctctggaggattagcaggtaccggggtgtttttgatgagaatttgaggaggcgggtgtttgagtccaaatccgtccatcaggggagacgggtgaaagttgccgtccgtgtgaggaattttggcccagatgggaccctgcaggtacacgtcccggttctgccagaccatgccgggcagagccccctggctgttgacagtctgtgtctggggtccggccgtagacgattgcaggttgctggagaccacaccgtattcttctgtagccacgggattggtggttttgatctcctcctcgctggtcattagcacgttttccagcgttgtcttgttggcagcccccgttttgccaaaaaccagcactccgttgatgggaaagaactggtcctcgtcgtccttgttggtggccatggctacgcccgggttggttaatgaatttctaccattcagatggtatttagtggccccggtccaggcaaagttactgttgttgttgctgtctatgttttttgacagtctctgctgccgataacagggtccgggcagccagttctttgattgctcggccatggtgttgggcccagcctgatggaactgcagctcccttgtggaccccgtagtgctctgggtccgggccaggtagtacaggtactggtcgatgaggggattcatcagccggtccaggctctggctatgcgcatagctgctgtggaaaggcacttcctcaaaggtgtagctgaattcaaagttattgcccgttctcagcatctgagaaggaaagtactccaggcagtagaaggaggaacgtcccacagactgactgccgttgtttagagtcagatatccgtactgaggaatcatgaacacgtccgcagggaacggagggaggcagccctggtgcgcagagccgaggacgtacggcagttggtactccgagtccgagaagacctgaatcgtgctggtaaggttattagcgatggtcgtaacgccgtcgtccgtcgtgacctccttgacctggatgttgaacaacttgaaccgcagctttctgggccggaatccccagttgttgttgatgagtcgctgccagtcacgtggtgagaagtggcagtggaatctgttaaagtcaaaatacccccagggggtgctgtagccgaagtaggtgttgtcgttggtgcttcctcccgatgtcccgttggagatttgcttgtagaggtggttgttgtaggtggggagggcccaggttcgggtgctggtggtgatgactctgtcgcccagccatgtggaatcgcaatgccaatttcctgaggaactacccactccgtcggcgccttcgttattgtctgccattggagcgccaccgcctgcagccattgtaccagatcccagaccagaggggcctgcggggggttctccgattggttgagggtcgggcactgactctgagtcgccagtctgcccaaagttgagtctctttttcgcgggctgctggcctgtcttgccgatgcccgtagaggagtctggagaacgctggggtgatggctctaccggtctcttctttccaggagccgtcttagcgccttcctcaaccagaccgagaggttcgagaacccgcttcttggcctggaagactgctcgcccgaggttgcccccaaaagacgtatcttcttgaagacgctcctgaaactcggcgtcggcgtggttgtacttgaggtacgggttgtccccctgctcgagctgcttgtcgtaggccttgtcgtgctcgagggccgcggcgtctgcctcgttgaccggctctcccttgtcgagtccgttgaagggtccgaggtacttgtagccaggaagcaccagaccccggccgtcgtcctgcttttgctggttggctttgggtttcggggctccaggtttcaagtcccaccactcgcgaatgccctcagagaggttgtcctcgagccaatctggaagataaccatcggcagccatacctggtttaagtcatttattgctcagaaacacagtcatccaggtccacgttgaccagatcgcaggccgagcaagcaatctcgggagcccgccccagcagatgatgaatggcacagagtttccgatacgtcctctttctgacgaccggttgagattctgacacgccggggaaacattctgaacagtctctggtcccgtgcgtgaagcaaatgttgaaattctgattcattctctcgcatgtcttgcagggaaacagcatctgaagcatgcccgcgtgacgagaacacttgttttggtacctgtcggcaaagtccaccggagctccttccgcgtctgacgtcgatggatgcaaaatgtcgcaaaagcactcacgtgacagctaatacaggaccactcccctatgacgtgatttacgtcagcgctatgcccgcgtgacgagaacatttgttttggtacctgtcggcaaagtccaccggagctccttccgcgtctgacgtcgatggatccgcgactgaggggcaggcccgcttgggctcgcttttatccgcgtcatcgggggcgggtctcttgttggctccaccctttctgacgtagaactcatgcgccacctcggtcacgtgatcctgcgcccagcggaagaactctttgacttcctgctttgtcaccttgccaaagtcatgctccagacggcgggtgagttcaaatttgaacatccggtcctgcaacggctgctggtgctcgaaggtggtgctgttcccgtcaatcacggcgcacatgttggtgttggaagtgacgatcacgggggtgggatcgatctgggcggaagacttgcacttttggtccacgcgcaccttgctgccgccgagaatggccttggcggactccacgaccttggccgtcatcttgccctcctcccaccagatcaccatcttgtcgacgcaatcgttgaagggaaagttctcattggtccagttgacgcagccgtagaaagggcgaattc

SEQ ID NO: 417 - protein, 738 aa, synthetic construct; identical to SEQ ID NO: 82
  REGION 1..738: note = source = /note="Description of Artificial Sequence: Synthetic polypeptide"

SEQ ID NO: 418 - protein, 738 aa, synthetic construct
  REGION 1..738: note = source = /note="Description of Artificial Sequence: Synthetic polypeptide"
MAADGYLPDWLEDNLSEGIREWWDLKPGAPKPKANQQKQDDGRGLVLPGYKYLGPFNGLDKGEPVNAADAAALEHDKAYDQQLKAGDNPYLRYNHADAEFQERLQEDTSFGGNLGRAVFQAKKRVLEPLGLVEEGAKTAPGKKRPVEPSPQRSPDSSTGIGKKGHQPARKRLNFGQTGDSESVPDPQPIGEPPAGPSGLGSGTMAAGGGAPMADNNEGADGVGSSSGNWHCDSTWLGDRVITTSTRTWALPTYNNHLYKQISNGTSGGSTNDNTYFGYSTPWGYFDFNRFHCHFSPRDWQRLINNNWGFRPKRLNFKLFNIQVKEVTQNEGTKTIANNLTSTIQVFTDSEYQLPYVPGSAHQGCLPPFPADVFMIPQYGYLTLNNGSQAVGRSSFYCLEYFPSQMLRTGNNFEFSYTFEDVPFHSSYAHSQSLDRLMNPLIDQYLYYLSRTQSTGGTQGTQQLLFSQAGPANMSAQAKNWLPGPCYRQQRVSTTLSQNNNSNFAWTGATKYHLNGRDSLVNPGVAMATHKDDEERFFPSSGVLMFGKQGAGKDNVDYSSVMLTSEEEIKTTNPVATEQYGVVADNLQQTNGAPIVGTVNSQGALPGMVWQNRDVYLQGPIWAKIPHTDGNFHPSPLMGGFGLKHPPPQILIKNTPVPADPPTTFSQAKLASFITQYSTGQVSVEIEWELQKENSKRWNPEIQYTSNYYKSTNVDFAVNTEGTYSEPRPIGTRYLTRNL

SEQ ID NO: 419 - protein, 738 aa, synthetic construct; identical to SEQ ID NO: 80
  REGION 1..738: note = source = /note="Description of Artificial Sequence: Synthetic polypeptide"

SEQ ID NO: 420 - protein, 728 aa, synthetic construct
  REGION 1..728: note = source = /note="Description of Artificial Sequence: Synthetic polypeptide"
MAADGYLPDWLEDNLSEGIREWWDLKPGAPKPKANQQKQDDGRGLVLPGYKYLGPFNGLDKGEPVNEADAAALEHDKAYDKQLEQGDNPYLKYNHADAEFQERLQEDTSFGGNLGRAVFQAKKRVLEPLGLVEEGAKTAPGKKRPIESPDSSTGIGRKGQQPAKKKLNFGQTGDSESVPDPQPIGEPPAGPSGLGSGTMAAGGGAPMADNNEGADGVGNASGNWHCDSTWLGDRVITTSTRTWALPTYNNHLYKQISSQSGATNDNHFFGYSTPWGYFDFNRFHCHFSPRDWQRLINNNWGFRPRKLRFKLFNIQVKEVTTNDGVTTIANNLTSTIQVFSDSEYQLPYVLGSAHQGCLPPFPADVFMIPQYGYLTLNNGSQSVGRSSFYCLEYFPSQMLRTGNNFEFSYTFEEVPFHSSYAHSQSLDRLMNPLIDQYLYYLARTQSTTGSTRELQFHQAGPNTMAEQSKNWLPGPCYRQQRLSKNIDSNNNSNFAWTGATKYHLNGRNSLTNPGVAMATNKDDEDQFFPINGVLVFGKTGAANKTTLENVLMTSEEEIKTTNPVATEEYGVVSSNLQSSTAGPQTQTVNSQGALPGMVWQNRDVYLQGPIWAKIPHTDGNFHPSPLMGGFGLKHPPPQILIKNTPVPANPPEVFTPAKFASFITQYSTGQVSVEIEWELQKENSKRWNPEIQYTSNYAKSNNVEFAVNNEGVYTEPRPIGTRYLTRNL

SEQ ID NO: 421 - DNA, 2489 bp, synthetic construct
  misc_feature 1..2489: note = source = /note="Description of Artificial Sequence: Synthetic polynucleotide"
  source 1..2489: mol_type = other DNA
gaattcgccctttctacggctgcgtcaactggaccaatgagaactttcccttcaacgattgcgtcgacaagatggtgatctggtgggaggagggcaagatgacggccaaggtcgtgaagtccgccaaggccattcatcatctgctggggcgggctcccgagattgcttgctcggcctgcgatctggtcaacgtggacctggatgactgtgtttctgagcaataaatgacttaaaccaggtatggctgccgatggttatcttccagattggctcgaggacaacctctctgagggcattcgcgagtggtgggacttgaaacctggagccccgaaacccaaagccaaccagcaaaagcaggacgacggccggggtctggtgcttcctggctacaagtacctcggacccttcaacggactcgacaagggagagccggtcaacgaggcagacgccgcggccctcgagcacgacaaggcctacgacaagcagctcgagcagggggacaacccgtacctcaagtacaaccacgccgacgccgagtttcaggagcgtcttcaagaagatacgtcttttgggggcaacctcgggcgagcagtcttccaggccaagaagcgggttctcgaacctctcggtctggttgaggaaggcgctaagacggctcctggaaagaagagacccatagaatcccccgactcctccacgggcatcggcaggaaaggccagcagcccgctaaaaagaagctcaactttgggcagactggcgactcagagtcagtgcccgaccctcaaccaatcggagaaccccccgcaggcccctctggtctgggatctggtacaatggctgcaggcggtggcgctccaatggcagacaataacgaaggcgccgacggagtgggtaatgcctccggaaattggcattgcgattccacatggctgggcgacagagtcatcaccaccagcacccgcacctgggccctgcccacctacaacaaccacctctacaagcagatatcaagtcagagcggggctaccaacgacaaccacttcttcggctacagcaccccctggggctattttgacttcaacagattccactgccacttctcaccacgtgactggcagcgactcatcaacaacaactggggattccggcccagaaagctgcggttcaagttgttcaacatccaggtcaaggaggtcacgacgaacgacggcgttacgaccatcgccaataaccttaccagcacgattcaggtcttctcggactcggagtaccaactgccgtacgtcctcggctctgcgcaccagggctgcctccctccgttccctgcggacgtgttcatgattcctcagtacggatatctgactctaaacaacggcagtcagtctgtgggacgttcctccttctactgcctggagtactttccttctcagatgctgagaacgggcaataactttgaattcagctacacctttgaggaagtgcctttccacagcagctatgcgcacagccagagcctggaccggctgatgaatcccctcatcgaccagtacctgtactacctggcccggacccagagcactacggggtccacaagggagctgcagttccatcaggctgggcccaacaccatggccgagcaatcaaagaactggctgcccggaccctgttatcggcagcagagactgtcaaaaaacatagacagcaacaacaacagtaactttgcctggaccggggccactaaataccatctgaatggtagaaattcattaaccaacccgggcgtagccatggccaccaacaaggacgacgaggaccagttctttcccatcaacggagtgctggtttttggcaaaacgggggctgccaacaagacaacgctggaaaacgtgctaatgaccagcgaggaggagatcaaaaccaccaatcccgtggctacagaagaatacggtgtggtctccagcaacctgcaatcgtctacggccggaccccagacacagactgtcaacagccagggggctctgcccggcatggtctggcagaaccgggacgtgtacctgcagggtcccatctgggccaaaattcctcacacggacggcaactttcacccgtctcccctgatgggcggatttggactcaaacacccgcctcctcaaattctcatcaaaaacaccccggtacctgctaatcctccagaggtgtttactcctgccaagtttgcctcatttatcacgcagtacagcaccggccaggtcagcgtggagatcgagtgggaactgcagaaagaaaacagcaaacgctggaatccagagattcagtacacctcaaattatgccaagtctaataatgtggaatttgctgtcaacaacgaaggggtttatactgagcctcgccccattggcacccgttacctcacccgtaacctgtaattgcctgttaatcaataaaccggttaattcgtttcagttgaactttggtcaagggcgaattc

SEQ ID NO: 422 - protein, 728 aa, synthetic construct
  REGION 1..728: note = source = /note="Description of Artificial Sequence: Synthetic polypeptide"
MAADGYLPDWLEDNLSEGIREWWDLKPGAPKPKANQQKQDDGRGLVLPGYKYLGPFNGLDKGEPVNAADAAALEHDKAYDQQLKAGDNPYLRYNHADAEFQERLQEDTSFGGNLGRAVFQAKKRVLEPLGLVEEGAKTAPGKKRPIESPDSSTGIGKKGQQPAKKKLNFGQTGDSESVPDPQPIGEPPAGPSGLGSGTMAAGGGAPMADNNEGADGVGNASGNWHCDSTWLGDRVITTSTRTWALPTYNNHLYKQISSQSGATNDNHFFGYSTPWGYFDFNRFHCHFSPRDWQRLINNNWGFRPRKLRFKLFNIQVKEVTTNDGVTTIANNLTSTIQVFSDSEYQLPYVLGSAHQGCLPPFPADVFMIPQYGYLTLNNGSQSVGRSSFYCLEYFPSQMLRTGNNFEFSYTFEEVPFHSSYAHSQSLDRLMNPLIDQYLYYLARTQSTTGSTRELQFHQAGPNTMAEQSKNWLPGPCYRRQRLSKDIDSNNNSNFAWTGATKYHLNGRNSLTNPGVAMATNKDDEDQFFPINGVLVFGKTGAANKTTLENVLMTSEEEIKTTNPVATEEYGVVSSNLQSSTAGPQTQTVNSQGALPGMVWQNRDVYLQGPIWAKIPHTDGNFHPSPLMGGFGLKHPPPQILIKNTPVPANPPEVFTPAKFASFITQYSTGQVSVEIEWELQKENSKRWNPEIQYTSNYAKSNNVEFAVNNEGVYTEPRPIGTRYLTRNL

SEQ ID NO: 423 - DNA, 3098 bp, synthetic construct
  misc_feature 1..3098: note = source = /note="Description of Artificial Sequence: Synthetic polynucleotide"
  source 1..3098: mol_type = other DNA
gaattcgccctttctacggctgcgtcaactggaccaatgagaactttcccttcaacgattgcgtcgacaagatggtgatctggtgggaggagggcaagatgacggccaaggtcgtggagtccgccaaggccattctcggcggcagcaaggtgcgcgtggaccaaaagtgcaagtcttccgcccagatcgatcccacccccgtgatcgtcacttccaacaccaacatgtgcgccgtgattgacgggaacagcaccaccttcgagcaccagcagccgttacaagaccggatgttcaaatttgaactcacccgccgtctggagcacgactttggcaaggtgacaaagcaggaagtcaaagagttcttccgctgggcgcaggatcacgtgaccgaggtggcgcatgagttctacgtcagaaagggtggagccaacaagagacccgcccccgatgacgcggataaaagcgagcccaagcgggcctgcccctcagtcgcggatccatcgacgtcagacgcggaaggagctccggtggactttgccgacaggtaccaaaacaaatgttctcgtcacgcgggcatgcttcagatgctgtttccctgcaagacatgcgagagaatgaatcagaatttcaacatttgcttcacgcacgggaccggagactgttcagaatgtttccccggcgtgtcagaatctcaaccggtcgtcagaaagaggacgtatcggaaactctgtgccattcatcatctgctggggcgggctcccgagattgcttgctcggcctgcgatctggtcaacgtggacctggatgactgtgtttctgagcaataaatgacttaaaccaggtatggctgccgatggttatcttccagattggctcgaggacaacctctctgagggcattcgcgagtggtgggacttgaaacctggagccccgaaacccaaagccaaccagcaaaagcaggacgacggccggggtctggtgcttcctggctacaagtacctcggacccttcaacggactcgacaagggagagccggtcaacgcggcggacgcagcggccctcgagcacgacaaggcctacgaccagcagctcaaagcgggtgacaatccgtacctgcggtataaccacgccgacgccgagtttcaggagcgtcttcaagaagatacgtcttttgggggcaacctcgggcgagcagtcttccaggccaagaagcgggttctcgaacctctcggtctggttgaggaaggcgctaagacggctcctggaaagaagagacccatagaatcccccgactcctccacgggcatcggcaagaaaggccagcagcccgctaaaaagaagctcaactttgggcagactggcgactcagagtcagtgcccgaccctcaaccaatcggagaaccccccgcaggcccctctggtctgggatctggtacaatggctgcaggcggtggcgctccaatggcagacaataacgaaggcgccgacggagtgggtaatgcctccggaaattggcattgcgattccacatggctgggcgacagagtcatcaccaccagcacccgcacctgggccctgcccacctacaacaaccacctctacaagcagatatcaagtcagagcggggctaccaacgacaaccacttcttcggctacagcaccccctggggctattttgacttcaacagattccactgccacttctcaccacgtgactggcagcgactcatcaacaacaactggggattccggcccagaaagctgcggttcaagttgttcaacatccaggtcaaggaggtcacgacgaacgacggcgttacgaccatcgctaataaccttaccagcacgattcaggtcttctcggactcggagtaccaactgccgtacgtcctcggctctgcgcaccagggctgcctccctccgttccctgcggacgtgttcatgattcctcagtacggatatctgactctaaacaacggcagtcagtctgtgggacgttcctccttctactgcctggagtactttccttctcagatgctgagaacgggcaataactttgaattcagctacacctttgaggaagtgcctttccacagcagctatgcgcacagccagagcctggaccggctgatgaatcccctcatcgaccagtacctgtactacctggcccggacccagagcactacggggtccacaagggagctgcagttccatcaggctgggcccaacaccatggccgagcaatcaaagaactggctgcccggaccctgttatcggcggcagagactgtcaaaagacatagacagcaacaacaacagtaactttgcctggaccggggccactaaataccatctgaatggtagaaattcattaaccaacccgggcgtagccatggccaccaacaaggacgacgaggaccagttctttcccatcaacggagtgctggtttttggcaaaacgggggctgccaacaagacaacgctggaaaacgtgctaatgaccagcgaggaggagatcaaaaccaccaatcccgtggctacagaagaatacggtgtggtctccagcaacctgcaatcgtctacggccggaccccagacacagactgtcaacagccagggggctctgcccggcatggtctggcagaaccgggacgtgtacctgcagggtcccatctgggccaaaattcctcacacggacggcaactttcacccgtctcccctgatgggcggatttggactcaaacacccgcctcctcaaattctcatcaaaaacaccccggtacctgctaatcctccagaggtgtttactcctgccaagtttgcctcatttatcacgcagtacagcaccggccaggtcagcgtggagatcgagtgggaactgcagaaagagaacagcaaacgctggaatccagagattcagtacacctcaaattatgccaagtctaataatgtggaatttgctgtcaacaacgaaggggtttatactgagcctcgccccattggcacccgttacctcacccgtaacctgtaattacttgttaatcaataaaccggttgattcgtttcagttgaactttggtctctgcgaagggcgaattc

SEQ ID NO: 424 - protein, 685 aa, synthetic construct
  REGION 1..685: note = source = /note="Description of Artificial Sequence: Synthetic polypeptide"
MAADGYLPDWLEDNLSEGIREWWDLKPGAPKPKANQQKQDDGRGLVLPGYKYLGPFNGLDKGEPVNEADAAALEHDKAYDKQLEQGDNPYLKYNHADAEFQERLQEDTSFGGNLGRAVFQAKKRVLEPLGLVEEGAKTAPGKKRPVEPSPQRSPDSSTGIGKTGQQPAKKRLNFGQTGDSESVPDPQPIGEPPAGPSGLGSGTMAAGGGAPMADNNEGADGVGSSSGNWHCDSTWLGDRVITTSTRTWALPTYNNHLYKQISNGTSGGSTNDNTYFGYSTPWGYFDFNRFHCHFSPRDWQRLINNNWGFRPKRLNFKLFNIQVKEVTQNEGTKTIANNLTSTIQVFTDSEYQLPYVLGSAHQGCLPPFPADVFMIPQYGYLTLNNGSQAVGRSSFYCLEYFPSQMLRTGNNFEFSYQFEDVPFHSSYAHSQSLDRLTNPLIDQYLYYLARTQSTTGSTRGLQFHQAGPNTMAEQSKNWLPGPCYRQQRLSKNIDSNNNSNFAWTGATKYHLNGRNSLTNPGVAMATNKDDEDQFFPINGVLVFGKTGAANKTTLENVLMTSEEEIKTTNPVATEEYGVVSSNLQSSTAGPQTQTVNSQGALPGMVWQNRDVYLQGPIWAKIPHTDGNFHPSPLMGGFGLKHPPPQILIKYTSNYYKSTNVDFAVNTEGTYSEPRPIGTRYLTRNL

SEQ ID NO: 425 - DNA, 2969 bp, synthetic construct
  misc_feature 1..2969: note = source = /note="Description of Artificial Sequence: Synthetic polynucleotide"
  source 1..2969: mol_type = other DNA
gaattcgccctttctacggctgcgtcaactggaccaatgagaactttcccttcaacgattgcgtcgacaagatggtgatctggtgggaggagggcaagatgacggccaaggtcgtggagtccgccaaggccattctcggcggcagcaaggtgcgcgtggaccaaaagtgcaagtcgtccgcccagatcgaccccacccccgtgatcgtcacctccaacaccaacatgtgcgccgtgattgacgggaacagcaccaccttcgagcaccagcagccgttacaagaccggatgttcaaatttgaactcacccgccgtctggagcacgactttggcaaggtgacaaagcaggaagtcaaagagttcttccgctgggcgcaggatcacgtgaccgaggtggcgcatgagttctacgtcagaaagggtggagccaacaagagacccgcccccgatgacgcggataaaagcgagcccaagcgggcctgcccctcagtcgcggatccatcgacgtcagacgcggaaggagctccggtggactttgccgacaggtaccaaaacaaatgttctcgtcacgcgggcatgcttcagatgctgtttccctgcaagacatgcgagagaatgaatcagaatttcaacatttgcttcacgcacgggaccagagactgttcagaatgtttccccggcgtgtcagaatctcaaccggtcgtcagaaagaggacgtatcggaaactctgtgccattcatcatctgctggggcgggctcccgagattgcttgctcggcctgcgatctggtcaacgtggacctggatgactgtgtttctgagcaataaatgacttaaaccaggtatggctgccgatggttatcttccagattggctcgaggacaacctctctgagggcatccgcgagtggtgggacttgaaacctggagccccgaaacccaaagccaaccagcaaaagcaggacgacggccggggtctggtgcttcctggctacaagtacctcggacccttcaacggactcgacaagggagagccggtcaacgaggcagacgccgcggccctcgagcacgacaaggcctacgacaagcagctcgagcagggggacaacccgtacctcaagtacaaccacgccgacgccgagtttcaggagcgtcttcaagaagatacgtcttttgggggcaacctcgggcgagcagtcttccaggccaagaagcgggttctcgaacctctcggtctggttgaggaaggcgctaagacggctcctggaaagaagagaccggtagagccatcaccccagcgttctccagactcctctacgggcatcggcaagacaggccagcagcccgcgaaaaagagactcaactttgggcagactggcgactcagagtcagtgcccgaccctcaaccaatcggagaaccccccgcaggcccctctggtctgggatctggtacaatggctgcaggcggtggcgctccaatggcagacaataacgaaggcgccgacggagtgggtagttcctcaggaaattggcattgcgattccacatggctgggcgacagagtcatcaccaccagcacccgaacctgggccctccccacctacaacaaccacctctacaagcaaatctccaacgggacatcgggaggaagcaccaacgacaacacctacttcggctacagcaccccctgggggtattttgactttaacagattccactgccacttctcaccacgtgactggcagcgactcatcaacaacaactggggattccggcccaagagactcaacttcaagctcttcaacatccaggtcaaggaggtcacgcagaatgaaggcaccaagaccatcgccaataaccttaccagcacgattcaggtctttacggactcggaataccagctcccgtacgtcctcggctctgcgcaccagggctgcctgcctccgttcccggcggacgtcttcatgattcctcagtacgggtacctgactctgaacaacggcagtcaggccgtgggccgttcctccttctactgcctggagtactttccttctcaaatgctgagaacgggcaacaactttgagttcagctaccagtttgaggacgtgccttttcacagcagctacgcgcacagccaaagcctggaccggctgacgaaccccctcatcgaccagtacctgtactacctggcccggacccagagcactacggggtccacaagggggctgcagttccatcaggctgggcccaacaccatggccgagcaatcaaagaactggctgcccggaccctgttatcggcagcagagactgtcaaaaaacatagacagcaacaacaacagtaactttgcctggaccggggccactaaataccatctgaatggtagaaattcattaaccaacccgggcgtagccatggccaccaacaaggacgacgaggaccagttctttcccatcaacggagtgctggtttttggcaaaacgggggctgccaacaagacaacgctggaaaacgtgctaatgaccagcgaggaggagatcaaaaccaccaatcccgtggctacagaagaatacggtgtggtctccagcaacctgcaatcgtctacggccggaccccagacacagactgtcaacagccagggggctctgcccggcatggtctggcagaaccgggacgtgtacctgcagggtcccatctgggccaaaattcctcacacggacggcaactttcacccgtctcccctgatgggcggatttggactcaaacacccgcctcctcaaattctcatcaagtatacttccaactactacaaatctacaaatgtggactttgctgtcaatactgagggtacttattcagagcctcgccccattggcacccgttacctcacccgtaacctgtaattgcctgttaatcaataaaccggttaattcgtttcagttgaactttggtctctgcgaagggcgaattc

SEQ ID NO: 426 - protein, 733 aa, synthetic construct
  REGION 1..733: note = source = /note="Description of Artificial Sequence: Synthetic polypeptide"
MAADGYLPDWLEDNLSEGIREWWDLKPGAPKPKANQQKQDDGRGLVLPGYKYLGPFNGLDKGEPVNAADAAALEHDKAYDQQLKAGDNPYLRYNHADAEFQERLQEDTSFGGNLGRAVFQAKKRVLEPLGLVEEGAKTAPGKKRPIESPDSSTGIGKKGQQPAKKKLNFGQTGDSESVPDPQPIGEPPAGPSGLGSGTMAAGGGAPMADNNEGADGVGSSSGNWHCDSTWLGDRVITTSTRTWALPTYNNHLYKQISNGTSGGSTNDNTYFGYSTPWGYFDFNRFHCHFSPRDWQRLINNNWGFRPKRLNFKLFNIQVKEVTQNEGTKTIANNLTSTIQVFTDSEYQLPYVLGSAHQGCLPPFPADVFMIPQYGYLTLNNGSQAVGRSSFYCLEYFPSQMLRTGNNFEFSYQFEDVPFHSSYAHSQSLDRLMNPLIDQYLYYLSRTQSTGGTAGTQQLLFSQAGPNNMSAQAKNWLPGPCYRQQRVSTTVSQNNNSNFAWTGATKYHLNGRDSLVNPGVAMATHKGDEERFFPSSGVLMFGKQGAGKDNVDYSSVMLTSEEEIKTTNPVATEQYGVVADNLQQQNAAPIVGAVNSQGALPGMVWQNRDVYLQGPIWAKIPHTDGNFHPSPLMGGFGLKHPPPQILIKNTPVPADPPTTFSQAKLASFITQYSTGQVSVEIEWELQKENSKRWNPEIQYTSNYYKSTNVDFAVNTEGTYSEPRPIGTRYLTRSL

SEQ ID NO: 427 - DNA, 3113 bp, synthetic construct
  misc_feature 1..3113: note = source = /note="Description of Artificial Sequence: Synthetic polynucleotide"
  source 1..3113: mol_type = other DNA
gaattcgccctttctacggctgcgtcaactggaccaatgagaactttcccttcaacgattgcgtcgacaagatggtgatctggtgggaggagggcaagatgacggccaaggtcgtggagtccgccaaggccattctcggcggcagcaaggtgcgcgtggaccaaaagtgcaagtcgtccgcccagatcgatcccacccccgtgatcgtcacttccaacaccaacatgtgcgccgtgattgacgggaacagcaccaccttcgagcaccagcagccgttacaagaccggatgttcaaatttgaactcacccgccgtctggagcatgactttggcaaggtgacaaagcaggaagtcaaagagttcttccgctgggcgcaggatcacgtgaccgaggtggcgcatgagttctacgtcagaaagggtggagccaacaagagacccgcccccgatgacgcggataaaagcgagcccaagcgggcctgcccctcagtcgcggatccatcgacgtcagacgcggaaggagctccggtggactttgccgacaggtaccaaaacaaatgttctcgtcacgcgggcatgcttcagatgctgtttccctgcaagacatgcgagagaatgaatcagaatttcaacatttgcttcacgcacgggaccagagactgttcagaatgtttccccggcgtgtcagaatctcaaccggtcgtcagaaagaggacgtatcggaaactctgtgccattcatcatctgctggggcgggctcccgagattgcttgctcggcctgcgatctggtcaacgtggacctggatgactgtgtttctgagcaataaatgacttaaaccaggtatggctgccgatggttatcttccagattggctcgaggacaacctctctgagggcattcgcgagtggtgggacttgaaacctggagccccgaaacccaaagccaaccagcaaaagcaggacgacggccggggtctggtgcttcctggctacaagtacctcggacccttcaacggactcgacaagggggagcccgtcaacgcggcggacgcagcggccctcgagcacgacaaggcctacgaccagcagctcaaagcgggtgacaatccgtacctgcggtataaccacgccgacgccgagtttcaggagcgtcttcaagaagatacgtcttttgggggcaacctcgggcgagcagtcttccaggccaagaagcgggttctcgaacctctcggtctggttgaggaaggcgctaagacggctcctggaaagaagagacccatagaatcccccgactcctccacgggcatcggcaagaaaggccagcagcccgctaaaaagaagctcaactttgggcagactggcgactcagagtcagtgcccgaccctcaaccaatcggagaaccccccgcaggcccctctggtctgggatctggtacaatggctgcaggcggtggcgctccaatggcagacaataacgaaggcgccgacggagtgggtagttcctcaggaaattggcattgcgattccacatggctgggcgacagagtcatcaccaccagcacccgaacctgggccctccccacctacaacaaccacctctacaagcaaatctccaacgggacatcgggaggaagcaccaacgacaacacctacttcggctacagcaccccctgggggtattttgactttaacagattccactgccacttctcaccacgtgactggcagcgactcatcaacaacaactggggattccggcccaagagactcaacttcaagctcttcaacatccaggtcaaggaggtcacgcagaatgaaggcaccaagaccatcgccaataaccttaccagcacgattcaggtctttacggactcggaataccagctcccgtacgtcctcggctctgcgcaccagggctgcctgcctccgttcccggcggacgtcttcatgattcctcagtacgggtacctgactctgaacaacggcagtcaggccgtgggccgttcctccttctactgcctggagtactttccttctcaaatgctgagaacgggcaacaactttgagttcagctaccagtttgaggacgtgccttttcacagcagctatgcgcacagccaaagcctggaccggctgatgaaccccctcatcgaccagtacctgtactacctgtctcggactcagtccacgggaggtaccgcaggaactcagcagttgctattttctcaggccgggcctaataacatgtcggctcaggccaaaaactggctacccgggccctgctaccggcagcaacgcgtctccacgacagtgtcgcaaaataacaacagcaactttgcttggaccggtgccaccaagtatcatctgaatggcagagactctctggtaaatcccggtgtcgctatggcaacgcacaagggcgacgaagagcgattttttccatccagcggagtcttgatgtttgggaaacagggagctggaaaagacaacgtggactatagcagcgttatgctaaccagtgaggaagaaatcaaaaccaccaacccagtggccacagaacagtacggcgtggtggccgataacctgcaacagcaaaacgccgctcctattgtaggggccgtcaacagtcaaggagccttacctggcatggtctggcagaaccgggacgtgtacctgcagggtcctatctgggccaagattcctcacacggacggcaactttcatccttcgccgctgatgggaggctttggactgaaacacccgcctcctcagatcctgattaagaatacacctgttcccgcggatcctccaactaccttcagtcaagccaagctggcgtcgttcatcacgcagtacagcaccggacaggtcagcgtggaaattgaatgggagctgcagaaagagaacagcaagcgctggaacccagagattcagtatacttccaactactacaaatctacaaatgtggactttgctgtcaatactgagggtacttattcagagcctcgccccattggcacccgttacctcacccgtagcctgtaattgcctgttaatcaataaaccggttgattcgtttcagttgaactttggtctctgcgaagggcgaattc

SEQ ID NO: 428 - protein, 738 aa, synthetic construct
  REGION 1..738: note = source = /note="Description of Artificial Sequence: Synthetic polypeptide"
MAADGYLPDWLEDNLSEGIREWWDLKPGAPKPKANQQKQDDGRGLVLPGYKYLGPFNGLDKGEPVNAADAAALEHDKAYDQQLKAGDNPYLRYNHADAEFQERLQEDTSFGGNLGRAVFQAKKRVLEPLGLVEEGAKTAPGKKRPVEPSPQRSPDSSTGIGKTGQQPAKKRLNFGQTGDSESVPDPQPIGEPPAGPSGLGSGTMAAGGGAPMADNNEGADGVGSSSGNWHCDSTWLGDRVITTSTRTWALPTYNNHLYKQISNGTSGGSTNDNTYFGYSTPWGYFDFNRFHCHFSPRDWQRLINNNWGFRPKRLNFKLFNIQVKEVTQNEGTKTIANNLTSTIQVFTDSEYQLPYVLGSAHQGCPPPFPADVFMIPQYGYLTLNNGSQAVGRSSFYCLEYFPSQMRRTGNNFEFSYQFEDVPFHSSYAHSQSLDRLMNPLIDQYLYYLSRTQSTGGTAGTQQLLFSQAGPNNMSAQAKNWLPGPCYRQQRVSTTLSQNNNSNFAWTGATKYHLNGRDSLVNPGVAMATHKDDEERFFPSSGVLMFGKQGAGKDNVDYSSVMLTSEEEIKTTNPVATEQYGVVADNLQQQNAAPIVGAVNSQGALPGMVWQNRDVYLQGPIWAKIPHTDGNFHPSPLMGGFGLKHPPPQILIKNTPVPADPPTTFSQAKLASFITQYSTGQVSVEIEWELQKENSKRWNPEIQYTSNYYKSTNVDFAVNTEGTYSEPRPIGTRYLTRNL

SEQ ID NO: 429 - DNA, 3128 bp, synthetic construct
  misc_feature 1..3128: note = source = /note="Description of Artificial Sequence: Synthetic polynucleotide"
  source 1..3128: mol_type = other DNA
gaattcgccctttctacggctgcgtcaactggaccaatgagaactttcccttcaacgattgcgtcgacaagatggtgatctggtgggaggagggcaagatgacggccaaggtcgtggagtccgccaaggccattctcggcggcagcaaggtgcgcgtggaccaaaagtgcaagtcgtccgcccagatcgaccccacccccgtgatcgtcacctccaacaccaacatgtgcgccgtgattgacgggaacagcaccaccttcgagcaccagcagccgttgcaggaccggatgttcaaatttgaactcacccgccgtctggagcatgactttggcaaggtgacaaagcaggaagtcaaagagttcttccgctgggcgcaggatcacgtgaccgaggtggcgcatgagttctacgtcagaaagggtggagccaacaagagacccgcccccgatgacgcggataaaagcgagcccaagcgggcctgcccctcagtcgcggatccatcgacgtcagacgcggaaggagctccggtggactttgccgacaggtaccaaaacaaatgttctcgtcacgcgggcatgcttcagatgctgtttccctgcaagacatgcgagagaatgaatcagaatttcaacatttgcttcacgcgcgggaccagagactgttcagaatgtttcccgggcgtgtcagaatctcaaccggtcgtcagaaagaggacgtatcggaaactctgtgccattcatcatctgctggggcgggctcccgagattgcttgctcggcctgcgatctggtcaacgtggacctggatgactgtgtttctgagcaataaatgacttaaaccaggtatggctgccgatggttatcttccagattggctcgaggacaacctctctgagggcattcgcgagtggtgggacttgaaacctggagccccgaaacccaaagccaaccagcaaaagcaggacgacggccggggtctggtgcttcctggctacaagtacctcggacccttcaacggactcgacaagggggagcccgtcaacgcggcggacgcagcggccctcgagcacgacaaggcctacgaccagcagctcaaagcgggtgacaatccgtacctgcggtataaccacgccgacgccgagtttcaggagcgtctgcaagaagatacgtcttttgggggcaacctcgggcgagcagtcttccaggccaagaagcgggttctcgaacctctcggtctggttgaggaaggcgctaagacggctcctggaaagaagagaccggtagagccatcaccccagcgttctccagactcctctacgggcatcggcaagacaggccagcagcccgcgaaaaagagactcaactttgggcagactggcgactcagagtcagtgcccgaccctcaaccaatcggagaaccccccgcaggcccctctggtctgggatctggtacaatggctgcaggcggtggcgctccaatggcagacaataacgaaggcgccgacggagtgggtagttcctcaggaaattggcattgcgattccacatggctgggcgacagagtcatcaccaccagcacccgaacctgggccctccccacctacaacaaccacctctacaagcaaatctccaacgggacatcgggaggaagcaccaacgacaacacctacttcggctacagcaccccctgggggtattttgactttaacagattccactgccacttctcaccacgtgactggcagcgactcatcaacaacaactggggattccggcccaagagactcaacttcaagctcttcaacatccaggtcaaggaggtcacgcagaatgaaggcaccaagaccatcgccaataaccttaccagcacgattcaggtctttacggactcggaataccagctcccgtacgtcctcggctctgcgcaccagggctgcccgcctccgttcccggcggacgtcttcatgattcctcagtacgggtacctgactctgaacaacggcagtcaggccgtgggccgttcctccttctactgcctggagtactttccttctcaaatgcggagaacgggcaacaactttgagttcagctaccagtttgaggacgtgccttttcacagcagctacgcgcatagccaaagcctggaccggctgatgaaccccctcatcgaccagtacctgtactacctgtctcggactcagtccacgggaggtaccgcaggaactcagcagttgctattttctcaggccgggcctaataacatgtcggctcaggccaaaaactggctacccgggccctgctaccggcagcaacgcgtctccacgacactgtcgcaaaataacaacagcaactttgcttggaccggtgccaccaagtatcatctgaatggcagagactctctggtaaatcccggtgtcgctatggcaacgcacaaggacgacgaagagcgattttttccatccagcggagtcttgatgtttgggaaacagggagctggaaaagacaacgtggactatagcagcgttatgctaaccagtgaggaagaaatcaaaaccaccaacccagtggccacagaacagtacggcgtggtggccgataacctgcaacagcaaaacgccgctcctattgtaggggccgtcaacagtcaaggagccttacctggcatggtctggcagaaccgggacgtgtacctgcagggtcctatctgggccaagattcctcacacggacggcaactttcatccttcgccgctgatgggaggctttggactgaaacacccgcctcctcagatcctgattaagaatacacctgttcccgcggatcctccaactaccttcagtcaagccaagctggcgtcgttcatcacgcagtacagcaccggacaggtcagcgtggaaattgaatgggagctgcagaaagagaacagcaagcgctggaacccagagattcagtatacttccaactactacaaatctacaaatgtggactttgctgtcaatactgagggtacttattcagagcctcgccccattggcacccgttacctcacccgtaacctgtaattgcctgttaatcaataaaccggttaattcgtttcagttgaactttggtctctgcgaagggcgaattc

SEQ ID NO: 430 - protein, 738 aa, synthetic construct; identical to SEQ ID NO: 418
  REGION 1..738: note = source = /note="Description of Artificial Sequence: Synthetic polypeptide"

SEQ ID NO: 431 - DNA, 1933 bp, synthetic construct
  misc_difference 1302: note = modified_base - a, c, t, or g
  misc_feature 1..1933: note = source = /note="Description of Artificial Sequence: Synthetic polynucleotide"
  source 1..1933: mol_type = other DNA
caaggcctacgaccagcagctcaaagcgggtgacaatccgtacctgcggtataaccacgccgacgccgagtttcaggagcgtcttcaagaagatacgtcttttgggggcaacctcgggcgagcagtcttccaggccaaaaagcgggttctcgaacctcttggtctggttgagacgccagctaagacggcacctggaaagaagcgaccggtagactcgccagactccacctcgggcatcggcaagaaaggccagcagcccgcgaaaaagagactcaactttgggcagactggcgactcagagtcagtccccgaccctcaaccaatcggagaaccaccagcaggcccctctggtctgggatctggtacaatggctgcaggcggtggcgcaccaatggctgacaataacgagggcgccgacggagtgggtaatgcctcaggaaattggcattgcgattccacatggctgggcgacagagtcatcaccaccagcacccgaacctgggccctgcccacctacaacaaccacctctacaagcaaatctccagtcagtcagcagggagcaccaacgataacgtctatttcggctacagcaccccctgggggtattttgacttcaacagattccattgccacttctcaccacgtgactggcagcgacttatcaacaacaactggggattccggcccaagaagctcaacttcaagctcttcaacatccaggtcaaggaggtcacgacgaatgacggtgtcacaaccatcgctaataaccttaccagcacggttcaggtcttttcggactcggaatatcaactgccgtacgtcctcggctccgcgcaccagggctgcctgcctccgttcccggcagacgtgttcatgattccgcagtacggatacctgactctgaacaatggcagccaatcggtaggccgttcctccttctactgcctggagtactttccttctcagatgctgagaacgggcaacaacttcacctttagctacaccttcgaggacgtgcctttccacagcagctacgcgcacagccagagtctggaccggctgatgaatcccctcatcgaccagtacctgtactacttggccagaacacagagcaacgcaggaggtactgctggcaatcgggaactgcagttttatcagggcggacctaccaccatggccgaacaagcaaagaactggctgcccggaccttgcttccggcaacagagagtatccaagacgctggatcaaaataacaacagcaactttgcctggactggtgccacaaaataccatttaaatgnaagaaattcattggttaatcccggtgtcgccatggcaacccacaaggacgacgaggaacgcttcttcccttcgagcggagttctaatttttggcaaaactggagcagctaataaaactacattagaaaacgtgctcatgacaaatgaagaagaaattcgtcctaccaacccggtagctaccgaggaatacgggattgtaagcagcaacttgcaggcggctagcaccgcagcccagacacaagttgttaacaaccagggagccttacctggcatggtctggcagaaccgggacgtgtacctgcaaggtcccatttgggccaagattcctcacacggacggcaactttcacccgtctcctctaatgggtggctttggactgaaacacccgcctccccagatcctgatcaaaaacacaccggtacctgctaatcctccagaagtgtttactcctgccaagtttgcttccttcatcacgcagtacagcaccgggcaagtcagcgttgagatcgagtgggagctgcagaaagagaacagcaagcgctggaacccagagattcagtacacctccaactttgacaaacagactggagtggactttgctgttgacagccagggtgtttactctgagcct

SEQ ID NO: 432 - protein, 733 aa, synthetic construct
  REGION 1..733: note = source = /note="Description of Artificial Sequence: Synthetic polypeptide"
MAADGYLPDWLEDNLSEGIREWWDLKPGAPKPKANQQKQDDGRGLVLPGYKYLGPFNGLDKGEPVNAADAAALEHDKAYDQQLKAGDNPYLRYNHADAEFQERLQEDTSFGGNLGRAVFQAKKRVLEPLGLVEEGAKTAPGKKRPLESPQEPDSSSGIGKKGKQPAKKRLNFEEDTGAGDGPPEGSDTSAMSSDIEMRAAPGGNAVDAGQGSDGVGNASGDWHCDSTWSEGKVTTTSTRTWVLPTYNNHLYLRLGTTSNSNTYNGFSTPWGYFDFNRFHCHFSPRDWQRLINNNWGLRPKAMRVKIFNIQVKEVTTSNGETTVANNLTSTVQIFADSSYELPYVMDAGQEGSLSPFPNDVFMVPQYGYCGIVTGENQNQTDRNAFYCLEYFPSQMLRTGNNFEMAYNFGKVPFHSMYAYSQSPDRLMNPLLDQYLWHLQSTTSGETLNQGNAATTFGKIRSGDFAFYRKNWLPGPCVKQQRLSKTASQNYKIPASGGNALLKYDTHYTLNNRWSNIAPGPPMATAGPSDGDFSNAQLIFPGPSVTGNTTTSANNLLFTSEEEIAATNPRDTDMFGQIADNNQNATTAPITGNVTAMGVLPGMVWQNRDIYYQGPIWAKIPHADGHFHPSPLIGGFGLKHPPPQIFIKNTPVPANPATTFTAARVDSFITQYSTGQVAVQIEWEIEKERSKRWNPEVQFTSNYGNQSSMLWAPDTTGKYTEPRVIGSRYLTNHL

SEQ ID NO: 433 - DNA, 3105 bp, synthetic construct
  misc_feature 1..3105: note = source = /note="Description of Artificial Sequence: Synthetic polynucleotide"
  source 1..3105: mol_type = other DNA
gaattcgcccttgctgcgtcaactggaccaatgagaactttcccttcaacgattgcgtcgacaagatggtgatctggtgggaggagggcaagatgaccgccaaggtcgtggagtccgccaaggccattctgggcggaagcaaggtgcgcgtggaccaaaagtgcaagtcatcggcccagatcgaccccacgcccgtgatcgtcacctccaacaccaacatgtgcgccgtgatcgacgggaacagcaccaccttcgagcaccagcagccgctgcaggaccgcatgttcaagttcgagctcacccgccgtctggagcacgactttggcaaggtgaccaagcaggaagtcaaagagttcttccgctgggctcaggatcacgtgactgaggtggcgcatgagttctacgtcagaaagggcggagccaccaaaagacccgcccccagtgacgcggatataagcgagcccaagcgggcctgcccctcagttgcggagccatcgacgtcagacgcggaagcaccggtggactttgcggacaggtaccaaaacaaatgttctcgtcacgcgggcatgcttcagatgctgtttccctgcaagacatgcgagagaatgaatcagaatttcaacgtctgcttcacgcacggggtcagagactgctcagagtgcttccccggcgcgtcagaatctcaacccgtcgtcagaaaaaagacgtatcagaaactgtgcgcgattcatcatctgctggggcgggcacccgagattgcgtgttcggcccgcgatctcgtcaacgtggacttggatgactgtgtttctgagcaataaatgacttaaaccaggtatggctgctgacggttatcttccagattggctcgaggacaacctctctgagggcattcgcgagtggtgggacctgaaacctggagcccccaagcccaaggccaaccagcagaagcaggacgacggccggggtctggtgcttcctggctacaagtacctcggacccttcaacggactcgacaagggggagcccgtcaacgcggcggacgcagcggccctcgagcacgacaaggcctacgaccagcagctcaaagcgggtgacaatccgtacctgcggtataaccacgccgacgccgagtttcaggagcgtctgcaagaagatacgtcttttgggggcaacctcgggcgagcagtcttccaggccaagaagagggtactcgaacctctgggcctggttgaagaaggtgctaagacggctcctggaaagaagagaccgttagagtcaccacaagagcccgactcctcctcaggaatcggcaaaaaaggcaaacaaccagccaaaaagagactcaactttgaagaggacactggagccggagacggaccccctgaaggatcagataccagcgccatgtcttcagacattgaaatgcgtgcagcaccgggcggaaatgctgtcgatgcgggacaaggttccgatggagtgggtaatgcctcgggtgattggcattgcgattccacctggtctgagggcaaggtcacaacaacctcgaccagaacctgggtcttgcccacctacaacaaccacttgtacctgcggctcggaacaacatcaaacagcaacacctacaacggattctccaccccctggggatactttgactttaacagattccactgtcacttctcaccacgtgactggcaaagactcatcaacaacaactggggactacgaccaaaagccatgcgcgttaaaatcttcaatatccaagttaaggaggtcacaacgtcgaacggcgagactacggtcgctaataaccttaccagcacggttcagatatttgcggactcgtcgtatgagctcccgtacgtgatggacgctggacaagagggaagtctgtctcctttccccaatgacgtcttcatggtgcctcaatatggctactgtggcattgtgactggcgaaaatcagaaccagacggacagaaatgctttctactgcctggagtattttccttcacaaatgctgagaactggcaataactttgaaatggcttacaactttgggaaggtgccgttccactcaatgtatgcttacagccagagcccggacagactgatgaatcccctcctggaccagtacctgtggcacttacagtcgaccacctctggagagactctgaatcaaggcaatgcagcaaccacatttggaaaaatcaggagtggagactttgccttttacagaaagaactggctgcctgggccttgtgttaaacagcagagactctcaaaaactgccagtcaaaattacaagattcctgccagcgggggcaacgctctgttaaagtatgacacccactataccttaaacaaccgctggagcaacatagcgcctggacctccaatggcaacagctggaccttcagatggggacttcagcaacgcccagctcatcttccctggaccatcagtcaccggaaacacaacaacctcagcaaacaatctgttgtttacatcagaagaagaaattgctgccaccaacccaagagacacggacatgtttggtcagattgctgacaataatcagaatgctacaactgctcccataaccggcaacgtgactgctatgggagtgcttcctggcatggtgtggcaaaacagagacatttactaccaagggccaatttgggccaagatcccacacgcggacggacattttcatccttcaccgctaattggcggttttggactgaaacatccgcctccccagatatttatcaaaaacacccccgtacctgccaatcctgcgacaaccttcactgcagccagagtggactctttcatcacacaatacagcaccggccaggtcgctgttcagattgaatgggaaatcgaaaaggaacgctccaaacgctggaatcctgaagtgcagtttacttcaaactatgggaaccagtcttctatgttgtgggctcccgatacaactgggaagtatacagagccgcgggttattggctctcgttatttgactaatcatttgtaactgcctagttaatcaataaaccgtgtgattcgtttcagttgaactttggtctctgcgaagggcgaattc

SEQ ID NO: 434 - protein, 733 aa, synthetic construct
  REGION 1..733: note = source = /note="Description of Artificial Sequence: Synthetic polypeptide"
MAADGYLPDWLEDNLSEGIREWWDLKPGAPKPKANQQKQDDGRGLVLPGYKYLGPFNGLDKGEPVNAADAAALEHDKAYDQQLKAGDNPYLRYNHADAEFQERLQEDTSFGGNLGRAVFQAKKRVLEPLGLVEEGAKTAPGKKRPLESPQEPDSSSGIGKKGKQPAKKRLNFEEDTGAGDGPPEGSDTSAMSSDIEMRAAPGGNAVDAGQGSDGVGNASGDWHCDSTWSEGKVTTTSTRTWVLPTYNNHLYLRLGTTSNSNTYNGFSTPWGYFDFNRFHCHFSPRDWQRLINNNWGLRPKAMRVKIFNIQVKEVTTSNGETTVANNLTSTVQIFADSSYELPYVMDAGQEGSLPPFPNDVFMVPQYGYCGIVTGENQNQTDRNAFYCLEYFPSQMLRTGNNFEMAYNFEKVPFHSMYAHSQSLDRLMNPLLDQYLWHLQSTTSGETLNQGNAATTFGKIRSGDFAFYRKNWLPGPCVKQQRFSKTASQNYKIPASGGNALLKYDTHYTLNNRWSNIAPGPPMATAGPSDGDFSNAQLIFPGPSVTGNTTTSANNLLFTSEEEIAATNPRDTDMFGQIADNNQNATTAPITGNVTAMGVLPGMVWQNRDIYYQGPIWAKIPHADGHFHPSPLIGGFGLKHPPPQIFIKNTPVPANPATTFTAARVDSFITQYSTGQVAVQIEWEIEKERSKRWNPEVQFTSNYGNQSSMLWAPDTTGKYTEPRVIGSRYLTNHL

SEQ ID NO: 435 - DNA, 3105 bp, synthetic construct
  misc_feature 1..3105: note = source = /note="Description of Artificial Sequence: Synthetic polynucleotide"
  source 1..3105: mol_type = other DNA
gaattcgcccttgctgcgtcaactggaccaatgagaactttcccttcaacgattgcgtcgacaagatggtgatctggtgggaggagggcaagatgaccgccaaggtcgtggagtccgccaaggccattctgggcggaagcaaggtgcgcgtggaccaaaagtgcaagtcatcggcccagatcgaccccacgcccgtgatcgtcacctccaacaccaacatgtgcgccgtgatcgacgggaacagcaccaccttcgagcaccagcagccgctgcaggaccgcatgttcaagttcgagctcacccgccgtctggagcacgactttggcaaggtgaccaagcaggaagtcaaagagttcttccgctgggctcaggatcacgtgactgaggtggcgcatgagttctacgtcagaaagggcggagccaccaaaagacccgcccccagtgacgcggatataagcgagcccaagcgggcctgcccctcagttgcggagccatcgacgtcagacgcggaagcaccggtggactttgcggacaggtaccaaaacaaatgttctcgtcacgcgggcatgcttcagatgctgtttccctgcaagacatgcgagagaatgaatcagaatttcaacgtctgcttcacgcacggggtcagagactgctcagagtgcttccccggcgcgtcagaatctcaacccgtcgtcagaaaaaagacgtatcagaaactgtgcgcgattcatcatctgctggggcgggcacccgagattgcgtgttcggcctgcgatctcgtcaacgtggacttggatgactgtgtttctgagcaataaatgacttaaaccaggtatggctgctgacggttatcttccagattggctcgaggacaacctctctgagggcattcgcgagtggtgggacctgaaacctggagcccccaagctcaaggccaaccagcagaagcaggacgacggccggggtctggtgcttcctggctacaagtacctcggacccttccacggactcgacaagggggagcccgtcaacgcggcggacgcagcggccctcgagcacgacaaggcctacgaccagcagctcaaagcgggtgacaatccgtacctgcggtataaccacgccgacgccgagtttcaggagcgtctgcaagaagatacgtcttttgggggcaacctcgggcgagcagtcttccaggccaagaagagggtactcgaaccactgggcctggttgaagaaggtgctaagacggctcctggaaagaagagaccgttagagtcaccacaagagcccgactcctcctcaggaatcggcaaaaaaggcaaacaaccagccaaaaagagactcaactttgaagaggacactggagccggagacggaccccctgaaggatcagataccagcgccatgtcttcagacattgaaatgcgtgcagcaccgggcggaaatgctgtcgatgcgggacaaggttccgatggagtgggtaatgcctcgggtgattggcattgcgattccacctggtctgagggcaaggtcacaacaacctcgaccagaacctgggtcttgcccacctacaacaaccacttgtacctgcggctcggaacaacatcaaacagcaacacctacaacggattctccaccccctggggatactttgactttaacagattccactgtcacttctcaccacgtgactggcaaagactcatcaacaacaactggggactacgaccaaaagccatgcgcgttaaaatcttcaatatccaagttaaggaggtcacaacgtcgaacggcgagactacggtcgctaataaccttaccagcacggttcagatatttgcggactcgtcgtatgagctcccgtacgtgatggacgctggacaagagggaagtctgcctcctttccccaatgacgtcttcatggtgcctcaatatggctactgtggcattgtgactggcgaaaatcagaaccagacggacagaaatgctttctactgcctggagtattttccttcacaaatgctgagaactggcaataactttgaaatggcttacaactttgagaaggtgccgttccactcaatgtatgctcacagccagagcctggacagactgatgaatcccctcctggaccagtacctgtggcacttacagtcgaccacctctggagagactctgaatcaaggcaatgcagcaaccacatttggaaaaatcaggagtggagactttgccttttacagaaagaactggctgcctgggccttgtgttaaacagcagagattctcaaaaactgccagtcaaaattacaagattcctgccagcgggggcaacgctctgttaaagtatgacacccactataccttaaacaaccgctggagcaacatagcgcctggacctccaatggcaacagctggaccttcagatggggacttcagcaacgcccagctcatcttccctggaccatcagtcaccggaaacacaacaacctcagcaaacaatctgttgtttacatcagaaggagaaattgctgccaccaacccaagagacacggacatgtttggtcagattgctgacaataatcagaatgctacaactgctcccataaccggcaacgtgactgctatgggagtgcttcctggcatggtgtggcaaaacagagacatttactaccaagggccaatttgggccaagatcccacacgcggacggacattttcatccttcaccgctaattggcggttttggactgaaacatccgcctccccagatatttatcaaaaacacccccgtacctgccaatcctgcgacaaccttcactgcagccagagtggactctttcatcacacaatacagcaccggccaggtcgctgttcagattgaatgggaaatcgaaaaggaacgctccaaacgccggaatcctgaagtgcagtttacttcaaactatgggaaccagtcttctatgttgtgggctcccgatacaactgggaagtatacagagccgcgggttattggctctcgttatttgactaatcatttgtaactgcctagttaatcaataaaccgtgtgattcgtttcagttgaactttggtctctgcgaagggcgaattc

SEQ ID NO: 436 - protein, 733 aa, synthetic construct
  REGION 1..733: note = source = /note="Description of Artificial Sequence: Synthetic polypeptide"
MAADGYLPDWLEDNLSEGIREWWDLKPGAPKPKANQQKQDDGRGLVLPGYEYLGPFNGLDKGEPVNAADAAALEHDKAYDQQLKAGDNPYLRYNHADAEFQERLQEDTSFGGNLGRAVFQAKKRVLEPLGLVEEGAKTAPGKKRPLESPQEPDSSSGIGKKGKQPAKKRLNFEEDTGAGDGPPEGSDTSAMSSDIEMRAAPGGNAVDAGQGSDGVGNASGDWHCDSTWSEGKVTTTSTRTWVLPTYNNHLYLRLGTTSNSNTYNGFSTPWGYFDFNRFHCHFSPRDWQRLINNNWGLRPKAMRVKIFNIQVKEVTTSNGETTVANNLTSTVQIFADSSYELPYVMDAGQEGSLPPFPNDVFMVPQYGYCGIVTGENQNQTDRNAFYCLEYFPSQMLRTGNNFETAYNFEKVPFHSMYAHSQSLDGLMNPLLDQYLWHLQSTTSGETLNQGNAATTFGKIRSGDFAFYRKNWLPGPCVKQQRFSKTASQNYKIPASGGNALLKYDTHYTLNNRWSNIAPGPPMATAGPSDGDFSNAQLIFPGPSVTGNTTTSANNLLFTSEEEIAATNPRDTDMFGQIADNNQNATTAPITGNVTAMGVLPGMVWQNRDIYYQGPIWAKIPHADGHFHPSPLIGGFGLKHPPPQIFIKNTPVPAYPATTFTAARVDSFITQYSTGQVAVQIEWEIEKERSKRWNPEVQFTSNCGNQSSMLWAPDTTGKYTEPRVIGSRYLTNHL

SEQ ID NO: 437 - DNA, 3105 bp, synthetic construct
  misc_feature 1..3105: note = source = /note="Description of Artificial Sequence: Synthetic polynucleotide"
  source 1..3105: mol_type = other DNA
gaattcgcccttcgcagagaccaaagttcaactgaaacgaatcacacggtttattgattaactaggcagttacaaatgattagtcaaataacgagagccaataacccgcggctctgtatacttcccagttgtatcgggagcccacaacatagaagactggttcccacagtttgaagtaaactgcacttcaggattccagcgtttggagcgttccttttcgatttcccattcaatctgaacagcgacctggccggtgctgtattgtgtgatgaaagagtccactctggctgcagtgaaggttgtcgcaggataggcaggtacgggggtgtttttgataaatatctggggaggcggatgtttcagtccaaaaccgccaattagcggtgaaggatgaaaatgtccgtccgcgtgtgggatcttggcccaaattggcccttggtagtaaatgtctctgttttgccacaccatgccaggaagcactcccatagcagtcacgttgccggttatgggagcagttgtagcattctgattattgtcagcaatctgaccaaacatgtccgtgtctcttgggttggtggcagcaatttcttcttctgatgtaaacaacagattgtttgctgaggttgttgtgtttccggtgactgatggtccagggaagatgagctgggcgttgctgaagtccccatctgaaggtccagctgttgccattggaggtccaggcgctatgttgctccagcggttgtttaaggtatagtgggtgtcatactttaacagagcgttgcccccgctggcaggaatcttgtaattttgactggcagtttttgagaatctctgctgtttaacacaaggcccaggcagccagttctttctgtaaaaggcaaagtctccactcctgatttttccaaatgtggttgctgcattgccttgattcagagtctctccagaggtggtcgactgtaagtgccacaggtactggtccaggaggggattcatcagtccgtccaggctctggctgtgagcatacattgagtggaacggcaccttctcaaagttgtaagccgtttcaaagttattgccagttctcagcatttgtgaaggaaaatactccaggcagtagaaagcatttctgtccgtctggttctgattttcgccagtcacaatgccacagtagccatattgaggcaccatgaagacgtcattggggaaaggaggcagacttccctcttgtccagcgtccatcacgtacgggagctcatacgacgagtccgcaaatatctgaaccgtgctggtaaggttattagcgaccgtagtctcgccgttcgacgttgtgacctccttaacttggatattgaagattttaacgcgcatggcttttggtcgtagtccccagttgttgttgatgagtctttgccagtcacgtggtgagaagtgacagtggaatctgttaaagtcaaagtatccccagggggtggagaatccgttgtaggtgttgctgtttgatgttgttccgagccgcaggtacaagtggttgttgtaggtgggcaagacccaggttctggtcgaggttgttgtgaccttgccctcagaccaggtggaatcgcaatgccaatcacccgaggcattacccactccatcggaaccttgtcccgcatcgacagcatttccgcccggtgctgcacgcatttcaatgtctgaagacatggcgctggtatctgatccttcagggggtccgtctccggctccagtgtcctcttcaaagttgagtctctttttggctggttgtttgccttttttgccgattcctgaggaggagtcgggctcttgtggtgactctaacggtctcttctttccaggagccgtcttagcaccttcttcaaccaggcccagaggttcgagtaccctcttcttggcctggaagactgctcgcccgaggttgcccccaaaagacgtatcttcttgcagacgctcctgaaactcggcgtcggcgtggttataccgcaggtacggattgtcacccgctttgagctgctggtcgtaggccttgtcgtgctcgagggccgctgcgtccgccgcgttgacgggctcccccttgtcgagtccgttgaagggtccgaggtactcgtagccaggaagcaccagaccccggccgtcgtcctgcttctgctggttggccttgggcttgggggctccaggtttcaggtcccaccactcgcgaatgccctcagagaggttgtcctcgagccaatctggaagataaccgtcagcagccatacctggtttaagtcatttattgctcagaaacacagtcatccaagtccacgttgacgagatcgcaggccgaacacgcaatctcgggtgcccgccccagcagatgatgaatcgcgcacagtttctgatacgtcttttttctgacgacgggttgagattctgacgcgccggggaagcactctgagcagtctctgaccccgtgcgtgaagcagacgttgaaattctgattcattctctcgcatgtcttgcagggaaacagcatctgaagcatgcccgcgtgacgagaacatttgttttggtacctgtccgcaaggtccaccggtgcttccgcgtctgacgtcgatggctccgcaactgaggggcaggcccgcttgggctcgcttatatccgcgtcactgggggcgggtcttttggtggctccgccctttctgacgtagaactcatgcgccacctcagtcacgtgatcctgagcccagcggaagaactctttgacttcctgcttggtcaccttgccaaagtcgtgctccagacggcgggtgagctcgaacttgaacatgcggtcctgcagcggctgctggtgctcgaaggtggtgctgttcccgtcgatcacggcgcacatgttggtgttggaggtgacgatcacgggcgtggggtcgatctgggccgatgacttgcacttttggtccacgcgcaccttgcttccgcccagaatggccttggcggactccacgaccttggcggtcatcttgccctcctcccaccagatcaccatcttgtcgacgcaatcgttgaagggaaagttctcattggtccagttgacgcagcaagggcgaattc

SEQ ID NO: 438 - protein, 729 aa, synthetic construct
  REGION 1..729: note = source = /note="Description of Artificial Sequence: Synthetic polypeptide"
MAADGYLPDWLEDNLSEGIREWWDLKPGAPKPKANQQKQDDGRGLVLPGYKYLGPFNGLDKGEPVNAADAAALEHDKAYDQQLKAGDNPYLRYNHADAEFQERLQEDTSFGGNLGRAVFQAKKRVLEPLGLVEEGAKTAPGKKRPIDSPDSSTGIGKKGQQPAKKKLNFGQTGDSESVPDPQPLGEPPAAPSSVGSGTMAAGGGAPMADNNEGADGVGNASGNWHCDSTWLGDRVITTSTRTWALPTYNNHLYKQISSSSSGATNDNHYFGYSTPWGYFDFNRFHCHFSPRDWQRLINNNWGFRPKKLRFKLFNIQVKEVTTNDGVTTIANNLTSTVQVFSDSEYQLPYVLGSAHQGCLPPFPADVFMIPQYGYLTLNNGSQSVGRSSFYCLEYFPSQMLRTGNNFEFSYSFEDVPFHSSYAHSQSLDRLMNPLIDQYLYYLARTQSTTGSTRELQFHQAGPNTMAEQSKNWLPGPCYRQQGLSKNLDFNNNSNFAWTAATKYHLNGRNSLTNPGIPMATNKDDEDQFFPINGVLVFGKTGAANKTTLENVLMTSEEEIKTTNPVATEEYGVVSSNLQPSTAGPQSQTINSQGALPGMVWQNRDVYLQGPIWAKIPHTDGNFHPSPLMGGFGLKHPPPQILIKNTPVPANPPEVFTPAKFASFITQYSTGQVSVEIEWELQKENSKRWNPEIQYTSNYAKSNNVEFAVNPDGVYTEPRPIGTRYLPRNL

SEQ ID NO: 439 - DNA, 3094 bp, synthetic construct
  misc_feature 1..3094: note = source = /note="Description of Artificial Sequence: Synthetic polynucleotide"
  source 1..3094: mol_type = other DNA
gaattcgcccttgctgcgtcaactggaccaagagaactttcccttcaacgattgcgtcgacaagatggtgatctggtgggaggagggcaagatgacggccaaggtcgtggagtccgccaaagccattctgggcggaagcaaggtgcgcgtcgaccaaaagtgcaagtcctcggcccagatcgatcccacccccgtgatcgtcacctccaacaccaacatgtgcgccgtgatcgacgggaacagcaccaccttcgagcaccagcagccgttgcaggaccggatgttcaaatttgaactcacccgccgtctggaacacgactttggcaaggtgaccaagcaggaagtcaaagagttcttccgctgggctagtgatcacgtgactgaggtgacgcatgagttctacgtcagaaagggcggagccagcaaaagacccgcccccgatgacgcggatataagcgagcccaagcgggcctgtccctcagtcacggacccatcgacgtcagacgcggaaggagctccggtggactttgccgacaggtaccaaaacaaatgttctcgtcacgcgggcatgcttcagatgctgtttccctgcaaaacgtgcgagagaatgaatcagaatttcaacatttgcttcacgcacggggtcagagactgtttagaatgtttccccggcgtgtcagaatctcaaccggtcgtcagaaaaaagacgtatcggaagctgtgtgcgattcatcatctgctggggcgggcacccgagattgcttgctcggcctgcgacctggtcaacgtggacctggacgactgtgtttctgagcaataaatgacttaaaccgggtatggctgccgatggttatcttccagattggctcgaggacaacctctctgagggcattcgcgagtggtgggacctgaaacctggagccccgaaacccaaagccaaccagcaaaagcaggacgacggccggggtctggtgcttcctggctacaagtacctcggacccttcaacggactcgacaagggggagcccgtcaacgcggcggacgcagcggccctcgagcacgacaaggcctacgaccagcagctcaaagcgggtgacaatccgtacctgcggtataaccacgccgacgccgagtttcaggagcgtctgcaagaagatacgtcatttgggggcaacctcgggcgagcagtcttccaggccaagaagcgggttctcgaacctctcggtctggttgaggaaggcgctaagacggctcctggaaagaagagacccatagactctccagactcctccacgggcatcggcaaaaaaggccagcagcccgctaaaaagaagctcaattttggtcagactggcgactcagagtcagtccccgaccctcaacctcttggagaacctccagcagcgccctctagtgtgggatctggtacaatggctgcaggcggtggcgcaccaatggcagacaataacgaaggtgccgacggagtgggtaatgcctcaggaaattggcattgcgattccacatggctgggcgacagagtcatcaccaccagcaccagaacctgggccctccccacctacaacaaccacctctacaagcaaatctccagcagcagctcaggagccaccaatgacaaccactacttcggctacagcaccccctgggggtattttgactttaacagattccactgccacttctcaccacgtgactggcagcgactcatcaacaacaactggggattccggcccaagaagctgcggttcaagctcttcaacatccaggtcaaggaggtcacaacgaatgacggcgtcacgaccatcgctaataaccttaccagcacggttcaggtcttctcggactcggaataccagctgccgtacgtcctcggctctgcgcaccagggctgcctgcctccgttcccggcggacgtcttcatgattcctcagtacggctacctgactctgaacaacggcagccaatcggtgggccgttcctccttctactgcctggaatatttcccctctcaaatgctgagaacgggcaacaactttgagttcagttacagcttcgaggacgtgcctttccacagcagctacgcgcacagccagagcctagaccggctgatgaaccctctcatcgaccagtacctgtactacctggcccggacccagagcaccacgggttccaccagggaactgcaatttcatcaagctgggcccaatactatggccgagcagtcaaagaactggctgcctggaccctgctataggcaacagggactgtcaaagaacttggactttaacaacaacagcaattttgcctggactgctgccactaaatatcatctgaatggcagaaactctttgaccaatcctggcattcccatggcaaccaacaaggatgatgaggaccagttctttcccatcaacggggtactggtttttggcaagacgggagctgccaacaaaactacgctggaaaacgttctgatgaccagcgaggaggagatcaagaccactaaccctgtggctacagaagaatacggtgtggtctccagcaacctgcagccgtctacagccgggcctcaatcacagactatcaacagccagggagcactgcctggcatggtctggcagaaccgggacgtgtatctgcagggtcccatctgggccaaaattcctcacacggatggcaactttcacccgtctcctctgatgggcggttttggactcaaacacccgcctccacagatcctgatcaaaaacacacctgtacctgctaatcctccggaggtgtttactcctgccaagtttgcctccttcatcacgcagtacagcaccggacaagtcagcgtggaaatcgagtgggagctgcagaaagaaaacagcaagcgctggaacccagaaattcagtatacttccaattatgccaagtctaataatgttgaatttgctgtgaaccctgatggtgtttatactgagcctcgccccattggcactcgttacctcccccgtaatctgtaattgcttgttaatcaataaaccggttgattcgtttcagttgaactttggtctctgcgaagggcgaattc

SEQ ID NO: 440 - protein, 1458 aa, synthetic construct
  REGION 1..1458: note = source = /note="Description of Artificial Sequence: Synthetic polypeptide"
MAADGYLPDWLEDNLSEGIREWWDLKPGAPKPKANQQKQDDGRGLVLPGYKYLGPFNGLDKGEPVNAADAAALEHDKAYDQQLKAGDNPYLRYNHADAEFQERLQEDTSFGGNLGRAVFQAKKRVLEPLGLVEEGAKTAPGKKRPIDSPDSSTGIGKKGQQPAKKKLNFGQTGDSESVPDPQPLGEPPAAPSSVGSGTMAAGGGAPTADNNEGADGVGNASGNWHCDSTWLGDRVITTSTRTWALPTYNNHLYKQISSSSSGATNDNHYFGYSTPWGYFDFNRFHCHFSPRDWQRLINNNWGFRPKKLRFKLFNIQVKEVTTNDGVTTIANNLTSTVQVFSDSEYQLPYVLGSAHQGCLPPFPADVFMIPQYGYLTLNNGSQSVGRSSFYCLEYFPSQMLRTGNNFEFSYSFEDVPFHSSYAHSQSLDRLMNPLIDQYLYYLARTQSTTGSTRELQFHQAGPNTMAEQSKNWLPGPCYRQQRLSKNLDFNNNSNFAWTAATKYHLNGRNSLTNPGIPMATNKDDEDQFFPINGVLVFGKTGAANKTTLENVLMTSEEEIKTTNPVATEEYGVVSSNLQSSTAGPQSQTINSQGALPGMVWQNRDVYLQGPIWAKIPHTDGNFHPSPLMGGFGLEHPPPQILIKNTPVPANPPEVFTPAKFASFITQYSTGQVSVEIEWELQKENSKRWNPEIQYTSNYAKSNNVEFAVNPDGVYTEPRPIGTRYLTRNLMAADGYLPDWLEDNLSEGIREWWDLKPGAPKPKANQQKQDDGRGLVLPGYKYLGPFNGLDKGEPVNAADAAALEHDKAYDQQLKAGDNPYLRYNHADAEFQERLQEDTSFGGNLGRAVFQAKKRVLEPLGLVEEGAKTAPGKKRPIGSPDSSTGIGKKGQQPAKKKLNFGQTGDSESVPDPQPLGEPPAAPSSVGSGTMAAGGGAPMADNNEGADGVGNASGNWHCDSTWLGDRVITTSTRTWALPTYNNHLYKQISSSSSGATNDNHYFGYSTPWGYFDFNRFHCHFSPRDWQRLINNNWGFRPKKLRFKLLNIQVKEVTTNDGVTTIANNLTSTVQVFSDSEYQLPYVLGSAHQGCLPPFPADVFMIPQYGYLTLDNGSQSVGRSSFYCLEYFPSQMLRTGNNFEFSYSFEDVPFHSSYAHSQSLDRLMNPLIDQYLYYLARTQSTTGSTRELQFHQAGPNTMAEQSKNWLPGPCYRQQRLSKNLDFNNNSNFAWTAATKYHLNGRNSLTNPGIPMATNKDDEDQFFPINGVLVFGKTGAANKTTLENVLMTSEEEIKTTNPVATEEYGVVSSNLQSSTAGPQSQTINSQGALPGMVWQNRDVYLQGPIWAKIPHTDGNFHPSPLMGGFGLKHPPPQILIKNTPVPANPPEVFTPAKFASFITQYSTGQVSVEIEWELQKENSKRWNPEIQYTSNYAKSNNVEFAVNPDGVYTEPRPIGTRYLTRNL

SEQ ID NO: 441 - DNA, 3095 bp, synthetic construct
  misc_feature 1..3095: note = source = /note="Description of Artificial Sequence: Synthetic polynucleotide"
  source 1..3095: mol_type = other DNA
gaattcgcccttcgcagagaccaaagttcaactgaaacgaatcaaccggtttattgattaacaagcaattacagattacgggtgaggtaacgagtgccaatggggcgaggctcagtataaacaccatcagggttcacagcaaattcaacattattagacttggcataattggaagtatactgaatttctgggttccagcgcttgctgttttctttctgcagctcccactcgatttccacgctgacttgtccggtgctgtactgcgtgatgaaggaggcaaacttggcaggagtaaacacctccggaggattagcaggtacaggtgtgtttttgatcaggatctgtggaggcgggtgtttgagtccaaaaccgcccatcagaggagacgggtgaaagttgccatccgtgtgaggaattttggcccagatgggaccctgcagatacacgtcccggttctgccagaccatgccaggcagtgctccctggctgttgatagtctgtgattgaggcccggctgtagacgactgcaggttgctggagaccacaccgtattcttctgtagccacagggttagtggtcttgatctcctcctcgctggtcatcagaacgttttccagcgtagttttgttggcagctcccgtcttgccaaaaaccagtaccccgttgatgggaaagaactggtcctcatcatccttgttggttgccatgggaatgccaggattggtcaaagagtttctgccattcagatgatatttagtggcagcagtccaggcaaaattgctgttgttgttaaagtccaagttctttgacagtctctgttgcctatagcagggtccaggcagccagttctttgactgctcggccatagtattgggcccagcttgatgaaattgcagttccctggtggaacccgtggtgctctgggtccgggccaggtagtacaggtactggtcgatgagagggttcatcagccggtctaggctctggctgtgcgcgtagctgctgtggaaaggcacgtcctcgaagctgtaactgaactcaaagttgttgcccgttctcagcatttgagaggggaaatattccaggcagtagaaggaggaacggcccaccgattggctgccgttgtccagagtcaggtagccgtactgaggaatcatgaagacgtccgccgggaacggaggcaggcagccctggtgcgcagagccgaggacgtacggcagctggtattccgagtccgagaagacctgaaccgtgctggtaaggttattagcgatggtcgtgacgccgtcattcgttgtgacctccttgacctggatgttgaggagcttgaaccgcagcttcttgggccggaatccccagttgttgttgatgagtcgctgccagtcacgtggtgagaagtggcagtggaatctgttaaagtcaaaatacccccagggggtgctgtagccgaagtagtggttgtcattggtggctcctgagctgctgctggagatttgcttgtagaggtggttgttgtaggtggggagggcccaggttctggtgctggtggtgatgactctgtcgcccagccatgtggaatcgcaatgccaatttcctgaggcattacccactccgtcggcaccttcgttattgtctgccattggtgcgccaccgcctgcagccattgtaccagatcccacactagagggcgctgctggaggttctccaagaggttgagggtcggggactgactctgagtcgccagtctgaccaaaattgagcttctttttagcgggctgctggccttttttgccgatgcccgtggaggagtctggagagcctatgggtctcttctttccaggagccgtcttagcgccttcctcaaccagaccgagaggttcgagaacccgcttcttggcctggaagactgctcgcccgaggttgcccccaaatgacgtatcttcttgcagacgctcctgaaactcggcgtcggcgtggttataccgcaggtacggattgtcacccgctttgagctgctggtcgtaggccttgtcgtgctcgagggccgctgcgtccgccgcgttgacgggctcccccttgtcgagtccgttgaagggtccgaggtacttgtagccaggaagcaccagaccccggccgtcgtcctgcttttgctggttggctttgggtttcggggctccaggtttcaggtcccaccactcgcgaatgccctcagagaggttgtcctcgagccaatctggaagataaccatcggcagccatacctggtttaagtcatttattgctcagaaacacagtcgtccaggtccacgttgaccaggtcgcaggccgagcaagcaatctcgggtgcccgccccagcagatgatgaatcgcacacagcttccgatacgtcttttttctgacgaccggttgagattctgacacgccggggaaacattctaaacagtctctgaccccgtgcgtgaagcaaatgttgaaattctgattcattctctcgcacgttttgcagggaaacagcacctgaagcatgcccgcgtgacgagaacatttgttttggtacctgtcggcaaagtccaccggagctccttccgcgtctgacgtcgatgggtccgtgactgagggacgggcccgcttgggctcgcttatatccgcgtcatcgggggcgggtcttttgctggctccgccctttctgacgtagaactcatgcgtcacctcagtcacgtgatcactagcccagcggaagaactctttgacttcctgctttgtcaccttgccaaagtcgtgttccagacggcgggtgagttcaaatttgaacatccggtcctgcaacggttgctggtgctcgaaggtggtgctgttcccgtcgatcacggcgcacatgttggtgttggaggtgacgatcacgggggtgggatcgatctgggcggacgacttgcacttttggtccacgcgcaccttgctgccgccgagaatggccttggcggactccacgaccttggccgtcatcttgccctcctcccaccagatcaccatcttgtcgacgcaatcgttgaagggaaagttctcattggtccagttgacgcagcaagggcgaattc

SEQ ID NO: 442 - DNA, 3095 bp, synthetic construct
  misc_feature 1..3095: note = source = /note="Description of Artificial Sequence: Synthetic polynucleotide"
  source 1..3095: mol_type = other DNA
gaattcgcccttcgcagagaccaaagttcaactgaaacgaatcaaccggtttattgattaacaagcaattacagattacgggtgaggtaacgagtgccaatggggcgaggctcagtataaacaccatcagggttcacagcaaattcaacattattagacttggcataattggaagtatactgaatttctgggttccagcgcttgctgttttctttctgcagctcccactcgatttccacgctgacttgtccggtgctgtactgcgtgatgaaggaggcaaacttggcaggagtaaacacctccggaggattagcaggtacaggtgtgtttttgatcaggatctgtggaggcgggtgttcgagtccaaaaccgcccatcagaggagacgggtgaaagttgccatccgtgtgaggaattttggcccagatgggaccctgcagatacacgtcccggttctgccagaccatgccaggcagtgctccctggctgttgatagtctgtgattgaggcccggctgtagacgactgcaggttgctggagaccacaccgtattcttctgtagccacagggttagtggtcttgatctcctcctcgctggtcatcagaacgttttccagcgtagttttgttggcagctcccgtcttgccaaaaaccagtaccccgttgatgggaaagaactggtcctcatcatccttgttggttgccatgggaatgccaggattggtcaaagagtttctgccattcagatgatatttagtggcagcagtccaggcaaaattgctgttgttgttaaagtccaagttctttgacagtctctgttgcctatagcagggtccaggcagccagttctttgactgctcggccatagtattgggcccagcttgatgaaattgcagttccctggtggaacccgtggtgctctgggtccgggccaggtagtacaggtactggtcgatgagagggttcatcagccggtctaggctctggctgtgcgcgtagctgctgtggaaaggcacgtcctcgaagctgtaactgaactcaaagttgttgcccgttctcagcatttgagaggggaaatattccaggcagtagaaggaggaacggcccaccgattggctgccgttgttcagagtcaggtagccgtactgaggaatcatgaagacgtccgccgggaacggaggcaggcagccctggtgcgcagagccgaggacgtacggcagctggtattccgagtccgagaagacctgaaccgtgctggtaaggttattagcgatggtcgtgacgccgtcattcgttgtgacctccttgacctggatgttgaagagcttgaaccgcagcttcttgggccggaatccccagttgttgttgatgagtcgctgccagtcacgtggtgagaagtggcagtggaatctgttaaagtcaaaatacccccagggggtgctgtagccgaagtagtggttgtcattggtggctcctgagctgctgctggagatttgcttgtagaggtggttgttgtaggtggggagggcccaggttctggtgctggtggtgatgactctgtcgcccagccatgtggaatcgcaatgccaatttcctgaggcattacccactccgtcggcaccttcgttattgtctgccgttggtgcgccaccgcctgcagccattgtaccagatcccacactagagggcgctgctggaggttctccaagaggttgagggtcggggactgactctgagtcgccagtctgaccaaaattgagcttctttttagcgggctgctggccttttttgccgatgcccgtggaggagtctggagagtctatgggtctcttctttccaggagccgtcttagcgccttcctcaaccagaccgagaggttcgagaacccgcttcttggcctggaagactgctcgcccgaggttgcccccaaatgacgtatcttcttgcaggcgctcctgaaactcggcgtcggcgtggttataccgcaggtacggattgtcacccgctttgagctgctggtcgtaggccttgtcgtgctcgagggccgctgcgtccgccgcgttgacgggctcccccttgtcgagtccgttgaagggtccgaggtacttgtagccaggaagcaccagaccccggccgtcgtcctgcttttgctggttggctttgggtttcggggctccaggtttcaggtcccaccactcgcgaatgccctcagagaggttgtcctcgagccaatctggaagataaccatcggcagccatacctggtttaagccatttattgctcagaaacacagtcgtccaggtccacgttgaccaggtcgcaggccgagcaggcaatctcgggtgcccgccccagcagatgatgaatcgcacacagcttccgatacgtcttttttctgacgaccggttgagattctgacacgccggggaaacattctaaacagtctctgaccccgtgcgtgaagcaaatgttgaaattctgattcattctctcgcacgttttgcagggaaacagcatctgaagcatgcccgcgtggcgagaacatttgttttggtacctgtcggcaaagtccaccggagctccttccgcgtctgacgtcgatgggtccgtgactgagggacaggcccgcttgggctcgcttatatccgcgtcatcgggggcgggtcttttgctggctccgccctttctgacgtagaactcatgcgtcacctcagtcacgtgatcactagcccagcggaagaactctttgacttcctgctttgtcaccttgccaaagtcgtgttccagacggcgggtgagttcaaatttgaacatccggtcctgcaacggctgctggtgctcgaaggtggtgctgttcccgtcgatcacggcgcgcatgttggtgttggaggtgacgatcacgggggtgggatcgatctgggcggacgacttgcacttttggtccacgcgcaccttgctgccgccgagaatggccttggcggactccacgaccttggccgtcatcttgccctcctcccaccagatcaccatcttgtcgacgcaatcgttgaagggaaagttctcattggtccagttgacgcagcaagggcgaattc

SEQ ID NO: 443 - protein, 729 aa, synthetic construct; identical to SEQ ID NO: 171
  REGION 1..729: note = source = /note="Description of Artificial Sequence: Synthetic polypeptide"

SEQ ID NO: 444 - protein, 729 aa, synthetic construct
  REGION 1..729: note = source = /note="Description of Artificial Sequence: Synthetic polypeptide"
MAADGYLPDWLEDNLSEGIREWWDLKPGAPKPKANQQKQDDGRGLVLPGYKYLGPFNGLDKGEPVNAADAAALEHDKAYDQQLKAGDNPYLRYNHADAEFQERLQEDTSFGGNLGRAVFQAKKRVLEPLGLVEEGAKTAPGKKRPIDSPDSSTGIGKKGQQPAKKKLNFGQTGDSESVPDPQPLGEPPAAPSSVGSGTMAAGGGAPTADNNEGADGVGNASGNWHCDSTWLGDRVITTSTRTWALPTYNNHLYKQISSSSSGATNDNHYFGYSTPWGYFDFNRFHCHFSPRDWQRLINNNWGFRPKKLRFKLFNIQVKEVTTNDGVTTIANNLTSTVQVFSDSEYQLPYVLGSAHQGCLPPFPADVFMIPQYGYLTLNNGSQSVGRSSFYCLEYFPSQMLRTGNNFEFSYSFEDVPFHSSYAHSQSLDRLMNPLIDQYLYYLARTQSTTGSTRELQFHQAGPNTMAEQSKNWLPGPCYRQQRLSKNLDFNNNSNFAWTAATKYHLNGRNSLTNPGIPMATNKDDEDQFFPINGVLVFGKTGAANKTTLENVLMTSEEEIKTTNPVATEEYGVVSSNLQSSTAGPQSQTINSQGALPGMVWQNRDVYLQGPIWAKIPHTDGNFHPSPLMGGFGLKHPPPQILIKNTPVPANPPEVFTPAKFASFITQYSTGQVSVEIEWELQKENSKRWNPEIQYTSNYAKSNNVEFAVNPDGVYTEPRPIGTRYLTRNL

SEQ ID NO: 445 - protein, 729 aa, synthetic construct
  REGION 1..729: note = source = /note="Description of Artificial Sequence: Synthetic polypeptide"
MAADGYLPDWLEDNLSEGIREWWDLKPGAPKPKANQQKQDDGRGLVLPGYKYLGPFNGLDKGEPVNAADAAALEHDKAYDQQLKAGDNPYLRYNHADAEFQERLQEDTSFGGNLGRAVFQAKKRVLEPLGLVEEGAKTAPGKKRPIDSPDSSTGIGKKGQQPAKKKLNFGQTGDSESVPDPQPLGEPPAAPSSVGSGTMAAGGGAPMADNNEGADGVGNASGNWHCDSTWLGDRVITTSTRTWALPTYNNHLYKQISSSSSGATNDNHYFGYSTPWGYFDFNRFHCHFSPRDWQRLINNNWGFRPKKLRFKLFNIQVKEVTTNDGVTTIANNLTSTVQVFSDSEYQLPYVLGSAHQGCLPPFPADVFMIPQYGYLTLNNGSQSVGRSSFYCLEYFPSQMLRTGNNFEFSYSFEDVPFHSSYAHSQSLDRLMNPLIDQYLYYLARTQSTTGSTRELQFHQAGPNTMAEQSKNWLPGPCYRQQRLSKNLDFNNNSNFAWTAATKYHLNGRNSLTNPGIPMATNKDDEDQFFPINGVLVFGKTGAANKTTLENVLMTSEEEIKTTNPVATEEYGVVSSNLQSSTAGPQSQTINSQGALPGMVWQNRDVYLQGPIWAKIPHTDGNFHPSPLMGGFGLKHPPPQILIKNTPVPANPPEVFTPAKFASFITQYSTGQVSVEIEWELQKENSKRWNPEIQYTSNYAKSNNVEFAVNPDGVYTEPRPIGTRYLTRNL

SEQ ID NO: 446 - DNA, 2217 bp, synthetic construct
  misc_feature 1..2217: note = source = /note="Description of Artificial Sequence: Synthetic polynucleotide"
  source 1..2217: mol_type = other DNA
atggctgctgacggttatcttccagattggctcgaggacaacctctctgagggcattcgcgagtggtgggacctgaaacctggagcccccaagcccaaggccaaccagcagaagcaggacgacggccggggtctggtgcttcctggctacaagtacctcggacccttcaacggactcgacaagggggagcccgtcaacgcggcggacgcagcggccctcgagcacgacaaggcctacgaccagcagctcaaagcgggtgacaatccgtacctgcggtataaccacgccgacgccgagtttcaggagcgtctacaagaagatacgtcttttgggggcaacctcgggcgagcagtcttccaggccaagaagcgggttctcgaacctctcggtctggttgaggaagctgctaagacggctcctggaaagaagagaccggtagaaccgtcacctcagcgttcccccgactcctccacgggcatcggcaagaaaggccagcggcccgctaaaaagagactgaactttggtcagactggcgactcagagtcagtccccgaccctcaaccaatcggagaaccaccagcaggcccctctggtctgggatctggtacaatggctgcaggcggtggcgctccaatggcagacaataacgaaggcgccgacggagtgggtagttcctcaggaaattggcattgcgattccacatggctgggcgacagagtcatcaccaccagcacccgaacctgggccctgcccacctacaacaaccacctctacaagcaaatatccaatgggacatcgggaggaagcaccaacgacaacacctacttcggctacagcaccccctgggggtattttgacttcaacagattccactgccacttctcaccacgtgactggcagcgactcatcaacaacaactggggattccggccaaaaagactcagcttcaagcccttcaacatccaggtcaaggaggtcacgcagaatgaaggcaccaagaccatcgccaataaccttaccagcacgattcaggtatttacggactcggaataccagctgccgtacgtcctcggctccgcgcaccagggctgcctgcctccgttcccggcggacgtcttcatgattccccagtacggctaccttacactgaacaatggaagtcaagccgtaggccgttcctccttctactgcctggaatattttccatctcaaatgctgcgaactggaaacaattttgaattcagctacaccttcgaggacgtgcctttccacagcagctacgcacacagccagagcttggaccgactgatgaatcctctcatcgaccagtacctgcactacttatccagaactcagtccacaggaggaactcaaggtacccagcaattgttattttctcaagctgggcctgcaaacatgtcggctcaggctaagaactggctacctggaccttgctaccggcagcagcgagtctctacgacactgtcgcaaaacaacaacagcaactttgcttggactggtgccaccaaatatcacctgaacggaagagactctttggtaaatcccggtgtcgccatggcaacccacaaggacgacgaggaacgcttcttcccgtcgagtggagtcctgatgtttggaaaacagggtgctggaagagacaatgtggactacagcagcgttatgctaaccagcgaagaagaaattaaaaccactaaccctgtagccacagaacaatacggtgtggtggctgacaacttgcagcaaaccaatacagggcctattgtgggaaatgtcaacagccaaggagccttacctggcatggtctggcagaaccgagacgtgtacctgcagggtcccatctgggccaagattcctcacacggacggcaacttccacccttcaccgctaatgggaggatttggactgaagcacccacctcctcagatcctgatcaagaacacgccggtacctgcggatcctccaacaacgttcagccaggcgaaattggcttccttcattacgcagtacagcaccggacaggtcagcgtggaaatcgagtgggagctgcagaaggagaacagcaaacgctggaacccagagattcagtacacttcaaactactacaaatctacaaatgtggactttgctgtcaatacagagggaacttattctgagcctcgccccattggtactcgctacctcacccgtaatctgtaa

SEQ ID NO: 447 - protein, 738 aa, synthetic construct
  REGION 1..738: note = source = /note="Description of Artificial Sequence: Synthetic polypeptide"
MAADGYLPDWLEDNLSEGIREWWDLKPGAPKPKANQQKQDDGRGLVLPGYKYLGPFNGLDKGEPVNAADAAALEHDKAYDQQLKAGDNPYLRYNHADAEFQERLQEDTSFGGNLGRAVFQAKKRVLEPLGLVEEAAKTAPGKKRPVEPSPQRSPDSSTGIGKKGQRPAKKRLNFGQTGDSESVPDPQPIGEPPAGPSGLGSGTMAAGGGAPMADNNEGADGVGSSSGNWHCDSTWLGDRVITTSTRTWALPTYNNHLYKQISNGTSGGSTNDNTYFGYSTPWGYFDFNRFHCHFSPRDWQRLINNNWGFRPKRLSFKPFNIQVKEVTQNEGTKTIANNLTSTIQVFTDSEYQLPYVLGSAHQGCLPPFPADVFMIPQYGYLTLNNGSQAVGRSSFYCLEYFPSQMLRTGNNFEFSYTFEDVPFHSSYAHSQSLDRLMNPLIDQYLHYLSRTQSTGGTQGTQQLLFSQAGPANMSAQAKNWLPGPCYRQQRVSTTLSQNNNSNFAWTGATKYHLNGRDSLVNPGVAMATHKDDEERFFPSSGVLMFGKQGAGRDNVDYSSVMLTSEEEIKTTNPVATEQYGVVADNLQQTNTGPIVGNVNSQGALPGMVWQNRDVYLQGPIWAKIPHTDGNFHPSPLMGGFGLKHPPPQILIKNTPVPADPPTTFSQAKLASFITQYSTGQVSVEIEWELQKENSKRWNPEIQYTSNYYKSTNVDFAVNTEGTYSEPRPIGTRYLTRNL

SEQ ID NO: 448 - DNA, 2217 bp, synthetic construct
  misc_feature 1..2217: note = source = /note="Description of Artificial Sequence: Synthetic polynucleotide"
  source 1..2217: mol_type = other DNA
atggctgctgacggttatcttccagattggctcgaggacaacctctctgagggcattcgcgagtggtgggacctgaaacctggagcccccaagcccaaggccaaccagcagaagcaggacgacggccggggtctggtgcttcctggctacaagtacctcggacccttcaacggactcgacaagggggagcccgtcaacgcggcggacgcagcggccctcgagcacgacaaggcctacgaccagcagctcaaagcgggtgacaatccgtacctgcggtataaccacgccgacgccgagtttcaggagcgtctgcaagaagatacgtcttttgggggcaacctcgggcgagcagtcttccaggccaagaagcgggttctcgaacctctcggtctggttgaggaagctgctaagacggctcctggaaagaagagaccggtagaaccgtcacctcagcgttcccccgactcctccacgggcatcggcaagaaaggccagcagcccgctaaaaagagactgaactttggtcagactggcgactcagagtcagtccccgaccctcaaccaatcggagaaccaccagcaggcccctctggtctgggatctggtacaatggctgcaggcggtggcgctccaatggcagacaataacgaaggcgccgacggagtgggtagttcctcaggaaattggcattgcgattccacatggctgggcgacagagtcatcaccaccagcacccgaacctgggccctgcccacctacaacaaccacctctacaagcaaatatccaatgggacatcgggaggaagcaccaacgacaacacctacttcggctacagcaccccctgggggtattttgacttcaacagattccactgccacttctcaccacgtgactggcagcgactcatcaacaacaactggggattccggccaaaaagactcagcttcaagctcttcaacatccaggtcaaggaggtcacgcagaatgaaggcaccaagaccatcgccaataaccttaccagcacgattcaggtatttacggactcggaataccagctgccgtacgtcctcggctccgcgcaccagggctgcctgcctccgttcccggcggacgtcttcatgattccccagtacggctaccttacactgaacaatggaagtcaagccgtaggccgttcctccttctactgcctggaatattttccatctcaaatgctgcgaactggaaacaattttgaattcagctacaccttcgaggacgtgcctttccacagcagctacgcacacagccagagcttggaccgactgatgaatcctctcatcgaccagtacctgtactacttatccagaactcagtccacaggaggaactcaaggtacccagcaattgttattttctcaagctgggcctgcaaacatgtcggctcaggctaagaactggctacctggaccttgctaccggcagcagcgagtctctacgacactgtcgcaaaacaacaacagcaactttgcttggactggtgccaccaaatatcacctgaacggaagagactctttggtaaatcccggtgtcgccatggcaacccacaaggacgacgaggaacgcttcttcccgtcgagtggagtcctgatgtttggaaaacagggtgctggaagagacaatgtggactacagcagcgttatgctaaccagcgaagaagaaattaaaaccactaaccctgtagccacagaacaatacggtgtggtggctgataacttgcagcaaaccaatacggggcctattgtgggaaatgtcaacagccaaggagccttacctggcatggtctggcagaaccgagacgtgtacctgcagggtcccatctgggccaagattcctcacacggacggcaacttccacccttcaccgctaatgggaggatttggactgaagcacccacctcctcagatcctgatcaagaacacgccggtacctgcggatcctccaacaacgttcagccaggcgaaattggcttccttcattacgcagtacagcaccggacaggtcagcgtggaaatcgagtgggagctgcagaaggagaacagcaaacgctggaacccagagattcagtacacttcaaactactacaaatctacaaatgtggactttgctgtcaatacagagggaacttattctgagcctcgccccattggtactcgttacctcacccgtaatctgtaa

SEQ ID NO: 449 - protein, 738 aa, synthetic construct; identical to SEQ ID NO: 101
  REGION 1..738: note = source = /note="Description of Artificial Sequence: Synthetic polypeptide"

SEQ ID NO: 450 - protein, 738 aa, synthetic construct
  REGION 1..738: note = source = /note="Description of Artificial Sequence: Synthetic polypeptide"
MAADGYLPDWLEDNLSEGIREWWDLKPGAPKPKANQQKQDDGRGLVLPGYKYLGPFNGLDKGEPVNAADAAALEHDKAYDQQLKAGDNPYLRYNHADAEFQERLQEDTSFGGNLGRAVFQAKKRVLEPLGLVEEAAKTAPGKKRPVEPSPQRSPDSSTGIGKKGQQPAKKRLNFGQTGDSESVPDPQPIGEPPAGPSGLGSGTMAAGGGAPMADNNEGADGVGSSSGNWHCDSTWLGDRVITTSTRTWALPTYNNHLYKQISNGTSGGSTNDNTYFGYSTPWGYFDFNRFHCHFSPRDWQRLINNNWGFRPKRLSFKLFNIQVKEVTQDEGTKTIANNLTSTIQVFTDSEYQLPYVLGSAHQGCLPPFPADVFMIPQYGYLTLNNGSQAVGRSSFYCLEYFPSQMLRTGNNFEFSYTFEDVPFHSSYAHSQSLDRLMNPLIDQYLYYLSRTQSTGGTQGTQQLLFSQAGPANMSARAKNWLPGPCYRQQRVSTTLSQNNNSNFAWTGATKYHLNGRDSLVNPGVAMATHKDDEERFFPSSGVLMFGKQGAGRDNVDYSSVMLTSEEEIKTTNPVATEQYGVVADNLQQANTGPIVGNVNSQGALPGMVWQNRDVYLQGPIWAKIPHTDGNFHPSPLMGGFGLKHPPPQILIKNTPVPADPPTTFSQAKLASFITQYSTGQVSVEIEWELQKENSKRWNPEIQYTSNYYKSTNVDFAVNSEGTYSEPRPIGTRYLTRNL

SEQ ID NO: 451 - DNA, 2217 bp, synthetic construct
  misc_feature 1..2217: note = source = /note="Description of Artificial Sequence: Synthetic polynucleotide"
  source 1..2217: mol_type = other DNA
atggctgctgacggttatcttccagattggctcgaggacaacctctctgagggcattcgcgagtggtgggacctgaaacctggagcccccaagcccaaggccaaccagcagaagcaggacgacggccggggtctggtgcttcctggctacaagtacctcggacccttcaacggactcgacaagggggagcccgtcaacgcggcggacgcagcggccctcgagcacgacaaggcctacgaccagcagctcaaagcgggtgacaatccgtacctgcggtataaccacgccgacgccgagtttcaggagcgtctgcaagaagatacgtcttttgggggcaacctcgggcgagcagtcttccaggccaagaagcgggttctcgaacctctcggtctggttgaggaagctgctaagacggctcctggaaagaagagaccggtagaaccgtcacctcagcgttcccccgactcctccacgggcatcggcaagaaaggccagcagcccgctaaaaagagactgaactttggtcagactggcgactcagagtcagtccccgaccctcaaccaatcggagaaccaccagcaggcccctctggtctgggatctggtacaatggctgcaggcggtggcgctccaatggcagacaataacgaaggcgccgacggagtgggtagttcctcaggaaattggcattgcgattccacatggctgggcgacagagtcatcaccaccagcacccgaacctgggccctgcccacctacaacaaccacctctacaagcaaatatccaatgggacatcgggaggaagcaccaacgacaacacctacttcggctacagcaccccctgggggtattttgacttcaacagattccactgccacttctcaccacgtgactggcagcgactcatcaacaacaactggggattccggccaaaaagactcagcttcaagctcttcaacatccaggtcaaggaggtcacgcaggatgaaggcaccaagaccatcgccaataaccttaccagcacgattcaggtatttacggactcggaataccagctgccgtacgtcctcggctccgcgcaccagggctgcctgcctccgttcccggcggacgtcttcatgattccccagtacggctaccttacactgaacaatggaagtcaagccgtaggccgttcctccttctactgcctggaatattttccatctcaaatgctgcgaactggaaacaattttgaattcagctacaccttcgaggacgtgcctttccacagcagctacgcacacagccagagcttggaccgactgatgaatcctctcatcgaccagtacctgtactacttatccagaactcagtccacaggaggaactcaaggtacccagcaattgttattttctcaagctgggcctgcaaacatgtcggctcgggctaagaactggctacctggaccttgctaccggcagcagcgagtctctacgacactgtcgcaaaacaacaacagcaactttgcttggactggtgccaccaaatatcacctgaacggaagagactctttggtaaatcccggtgttgctatggcaacgcataaggacgacgaggaacgtttctttccatcgagcggagtcctgatgtttggaaaacagggtgctggaagagacaatgtggactatagcagcgttatgctaaccagcgaggaagaaattaaaaccactaaccctgtagccacagaacaatacggtgtggtggctgacaacttgcagcaagccaatacagggcctattgtgggaaatgtcaacagccaaggagccttacctggcatggtctggcagaaccgagacgtgtacctgcagggtcccatctgggccaaaattcctcacacggacggcaattttcacccgtctcctctgatgggcggctttggactgaagcacccacctccccagatcctgatcaagaatacgccggtacctgcggatcctccaacgacgttcagccaggcaaaattggcttccttcatcacgcagtacagcaccggccaggtcagcgtggagatcgagtgggagctgcagaaggagaacagcaagcgatggaacccagaaattcagtacacttccaactactacaaatctacaaatgtggactttgctgtcaattctgagggtacatattcagagcctcgccccattggtactcgttatctgacacgtaatctgtaa

SEQ ID NO: 452 - DNA, 2211 bp, synthetic construct
  misc_feature 1..2211: note = source = /note="Description of Artificial Sequence: Synthetic polynucleotide"
  source 1..2211: mol_type = other DNA
atggctgccgatggttatcttccagattggctcgaggacaacctctctgagggcattcgcgagtggtgggacttgaaacctggagccccgaaacccaaagccaaccagcaaaagcaggacgacggccggggcctggtgcttcctggctacaagtacctcggacccttcaacggactcgacaagggggagcccgtcaacgcggcggacgcagcggccctcgagcacgacaaggcctacgaccagcagctcgaagcgggtgacaatccgtacctgcggtataaccacgccgacgccgagtttcaggagcgtctgcaagaagatacgtcttttgggggcaacctcgggcgagcagtcttccaggccaagaagcgggttctcgaacctctcggtctggttgaggaaggcgctaagacggctcctggaaagaagagaccagtagagcagtcaccccaagaaccagactcctcctcgggcatcggcaagaaaggccaacagcccgccagaaaaagactcaattttggccagactggcgactcagagtcagttccagaccctcaacctctcggagaacctccagcagcgccctctggtgtgggacctaatacaatggctgcaggcggtggcgcaccaatggcagacaataacgaaggcgccgacggagtgggtagttcctcgggaaattggcattgcgattccacatggctgggcgacagagtcatcaccaccagcacccgaacctgggccctgcccacctacaacaaccacctctacaagcaaatctccaacgggacatcgggaggagccaccaacgacaacacctacttcggctacagcaccccctgggggtattttgactttaacagattccactgccacttttcaccacgtgactggcagcgactcatcaacaacaactggggattccggcccaagagactcagcttcaagctcttcaacatccaggtcaaggaggtcacgcagaatgaaggcaccaagaccatcgccaataacctcaccagcaccatccaggtgtttacggactcggagtaccagctgccgtacgttctcggctctgcccaccagggctgcctgcctccgttcccggcggacgtgttcatgattccccagtacggctacctaacactcaacaacggtagtcaggccgtgggacgctcctccttctactgcctggaatactttccttcgcagatgctgagaaccggcaacaacttccagtttacttacaccttcgaggacgtgcctttccacagcagctacgcccacagccagagcttggaccggctgatgaatcctctgattgaccagtacctgtactacttgtctcggactcaaacaacaggaggcacggcaaatacgcagactctgggcttcagccaaggtgggcctaatacaatggccaatcaggcaaagaactggctgccaggaccctgttaccgccaacaacgcgtctcaacgacaaccgggcaaaacaacaatagcaactttgcctggactgctgggaccaaataccatctgaatggaagaaattcattggctaatcctggcatcgctatggcaacacacaaagacgacgaggagcgttttttcccagtaacgggatcctgtttttggcaacaaaatgctgccagagacaatgcggattacagcgatgtcatgctcaccagcgaggaagaaatcaaaaccactaaccctgtggctacagaggaatacggtatcgtggcagataacttgcagcagcaaaacacggctcctcaaattggaactgtcaacagccagggggccttacccggtatggtctggcagaaccgggacgtgtacctgcagggtcccatctgggccaagattcctcacacggacggcaacttccacccgtctccgctgatgggcggctttggcctgaaacatcctccgcctcagatcctgatcaagaacacgcctgtacctgcggatcctccgaccaccttcaaccagtcaaagctgaactctttcatcacgcaatacagcaccggacaggtcagcgtggaaattgaatgggagctacagaaggaaaacagcaagcgctggaaccccgagatccagtacacctccaactactacaaatctacaagtgtggactttgctgttaatacagaaggcgtgtactctgaaccccgccccattggcacccgttacctcacccgtaatctgtaa

SEQ ID NO: 453 - protein, 736 aa, synthetic construct
  REGION 1..736: note = source = /note="Description of Artificial Sequence: Synthetic polypeptide"
MAADGYLPDWLEDNLSEGIREWWDLKPGAPKPKANQQKQDDGRGLVLPGYKYLGPFNGLDKGEPVNAADAAALEHDKAYDQQLEAGDNPYLRYNHADAEFQERLQEDTSFGGNLGRAVFQAKKRVLEPLGLVEEGAKTAPGKKRPVEQSPQEPDSSSGIGKKGQQPARKRLNFGQTGDSESVPDPQPLGEPPAAPSGVGPNTMAAGGGAPMADNNEGADGVGSSSGNWHCDSTWLGDRVITTSTRTWALPTYNNHLYKQISNGTSGGATNDNTYFGYSTPWGYFDFNRFHCHFSPRDWQRLINNNWGFRPKRLSFKLFNIQVKEVTQNEGTKTIANNLTSTIQVFTDSEYQLPYVLGSAHQGCLPPFPADVFMIPQYGYLTLNNGSQAVGRSSFYCLEYFPSQMLRTGNNFQFTYTFEDVPFHSSYAHSQSLDRLMNPLIDQYLYYLSRTQTTGGTANTQTLGFSQGGPNTMANQAKNWLPGPCYRQQRVSTTTGQNNNSNFAWTAGTKYHLNGRNSLANPGIAMATHKDDEERFFPVTGSCFWQQNAARDNADYSDVMLTSEEEIKTTNPVATEEYGIVADNLQQQNTAPQIGTVNSQGALPGMVWQNRDVYLQGPIWAKIPHTDGNFHPSPLMGGFGLKHPPPQILIKNTPVPADPPTTFNQSKLNSFITQYSTGQVSVEIEWELQKENSKRWNPEIQYTSNYYKSTSVDFAVNTEGVYSEPRPIGTRYLTRNL

SEQ ID NO: 454 - DNA, 2214 bp, synthetic construct
  misc_feature 1..2214: note = source = /note="Description of Artificial Sequence: Synthetic polynucleotide"
  source 1..2214: mol_type = other DNA
atggctgctgacggttatcttccagattggctcgaggacaacctctctgagggcattcgcgagtggtgggacctgaaacctggagcccccaagcccaaggccaaccagcagaagcaggacgacggccggggtctggtgcttcctggctacaagtacctcggacccttcaacggactcgacaagggggagcccgtcagcgcggcggacgcagcggccctcgagcacgacaaggcctgcgaccagcggctcaaagcgggtgacaatccgtacctgcggtataaccacgccgacgccgagtttcaggagcgtctgcaagaagatacgtcttttgggggcaacctcgggcgagcagtcttccaggccaagaagcgggttctcgaacctctcggtctggttgaggaagctgctaagacggctcctggaaagaagggaccggtagaaccgtcacctcagcgttcccccgactcctccacgggcatcggcaagaaaggccagcagcccgctagaaagagactgaactttgggcagactggcgactcagagtcagtccccgaccctcaaccaatcggagaaccaccagcaggcccctctggtctgggatctggtacaatggctgcaggcggtggcgcaccaatggctgacaataacgagggcgccgacggagtgggtaatgcctcaggaaattggcattgcgattccacatggctgggcgacagagtcatcaccaccagcacccgaacctgggctttgcccacctacaacaatcacctctacaagcaaatctccagtcagtcagcaggtagcaccaacgacaacgtctacttcggctacagcaccccctgggggtattttgacttcaacagattccactgtcacttctcaccacgtgactggcagcggctcatcaacaacaactggggattccggcccaagaagctcaacttcaagctgttcaacatccaggtcaaggaggtcacaacgaatgacggcgtcacgaccatcgccaataaccttaccagcacggttcaggtcttttcggactcggaataccagctgccctacgtcctcggctccgcacaccagggctgcctgcctccgttcccggcggacgtcttcatgattccccagtacggctacctgactctgaacaatggcagccaatcggtgggtcgttcctctttctactgcctggaatatttcccttctcaaatgctgagaacgggcaacaacttcaccttcagctacaccttcgaggacgttcccttccacagcagctacgcacacagccagagcctggaccggctgatgaatcctcttatcgaccagtacctgtattacctggccagaacacagagcaacgcaggaggcacagctggcaatcgggaactgcagttttatcagggcgggcctaccaccatggccgaacaagccaaaaactggctgcctggaccttgcttccggcaacaaagagtctccaagacgctggatcaaaacaacaacagcaactttgcttggactggtgccaccaaataccatctaaatggaagaaattcattggttaatcccggtgtcgccatggcaacccacaaggacgacgaggaacgcttcttcccttcgagcggagtcctgatttttggaaaaactggagcagctaataagactacactggaaaatgtgttaatgacaaatgaagaggaaattcgtcctaccaacccggtagccaccgaggaatacgggactgttagcagcaacctgcaggcggctaacactgcagcccagacacaagttgtcaacaaccagggagccttacctggtatggtctggcagaaccgggacgtgtacctgcagggtcccatctgggccaagattcctcacacggacggcaactttcacccgtctccgctgatgggcggctttggactgaagcatccgcctcctcagatcctgatcaaaaacactcctgttcctgctaatcccccggaggtgtttacgcctgccaagtttgcttctttcatcacacagtacagcaccggccaggtcagcgtggagatcgagtgggagctgcagaaggagaacagcaagcgctggaacccagagattcagtatacctccaattttgacgaacagactggtgtggactttgccgttgacagccagggtgtttattctgagcctcgccccattggtactcgttacctcacccgtaatctgtaa

SEQ ID NO: 455 - protein, 737 aa, synthetic construct
  REGION 1..737: note = source = /note="Description of Artificial Sequence: Synthetic polypeptide"
MAADGYLPDWLEDNLSEGIREWWDLKPGAPKPKANQQKQDDGRGLVLPGYKYLGPFNGLDKGEPVSAADAAALEHDKACDQRLKAGDNPYLRYNHADAEFQERLQEDTSFGGNLGRAVFQAKKRVLEPLGLVEEAAKTAPGKKGPVEPSPQRSPDSSTGIGKKGQQPARKRLNFGQTGDSESVPDPQPIGEPPAGPSGLGSGTMAAGGGAPMADNNEGADGVGNASGNWHCDSTWLGDRVITTSTRTWALPTYNNHLYKQISSQSAGSTNDNVYFGYSTPWGYFDFNRFHCHFSPRDWQRLINNNWGFRPKKLNFKLFNIQVKEVTTNDGVTTIANNLTSTVQVFSDSEYQLPYVLGSAHQGCLPPFPADVFMIPQYGYLTLNNGSQSVGRSSFYCLEYFPSQMLRTGNNFTFSYTFEDVPFHSSYAHSQSLDRLMNPLIDQYLYYLARTQSNAGGTAGNRELQFYQGGPTTMAEQAKNWLPGPCFRQQRVSKTLDQNNNSNFAWTGATKYHLNGRNSLVNPGVAMATHKDDEERFFPSSGVLIFGKTGAANKTTLENVLMTNEEEIRPTNPVATEEYGTVSSNLQAANTAAQTQVVNNQGALPGMVWQNRDVYLQGPIWAKIPHTDGNFHPSPLMGGFGLKHPPPQILIKNTPVPANPPEVFTPAKFASFITQYSTGQVSVEIEWELQKENSKRWNPEIQYTSNFDEQTGVDFAVDSQGVYSEPRPIGTRYLTRNL

SEQ ID NO: 456 - DNA, 2214 bp, synthetic construct
  misc_feature 1..2214: note = source = /note="Description of Artificial Sequence: Synthetic polynucleotide"
  source 1..2214: mol_type = other DNA
atggctgccgatggttatcttccagattggctcgaggacaacctctctgagggcattcgcgagtggtgggacctgaaacctggagccccgaaacccaaagccaaccagcaaaagcaggacgacggccggggtctggtgcttcctggctacaagtacctcggacccttcaacggactcgacaagggggagcccgtcaacgcggcggacgcagcggccctcgagcacgacaaggcctacgaccagcagctcaaagcgggtgacaatccgtacctgcggtataaccacgccgacgccgagtttcaggagcgtctgcaagaagatacgtcttttgggggcaacctcgggcgagcagtcttccaggccaagaagcgggttctcgaacctctcggtctggttgaggaagctgctaagacggctcctggaaagaagagaccggtagaaccgtcacctcagcgttcccccgactcctccacgggcatcggcaagaaaggccagcagcccgctagaaagagactgaactttgggcagactggcgactcagagtcagtccccgaccctcaaccaatcggagaaccaccagcaggcccctctggtctgggatctggtacaatggctgcaggcggtggcgctccaatggcagacaataacgaaggcgccgacggagtgggtaatgcctcaggaaattggcattgcgattccacatggctgggcgacagagtcatcaccaccagcacccgaacctgggctttgcccacctacaacaaccacctctacaagcaaatctccagtcagtcagcaggtagcaccaacgacaacgtctacttcggctacagcaccccctgggggtattttgacttcaacagattccactgtcacttctcaccacgtgactggcagcggctcatcaacaacaactggggattccggcccaagaagctcaacttcaagctgttcaacatccaggtcaaggaggtcacaacgaatgacggcgtcacgaccatcgccaataaccttaccagcacggttcaggtcttttcggactcggaataccagctgccctacgtcctcggctccgcacaccagggctgcctgcctccgttcccggcggacgtcttcatgattcctcagtacggctacctgactctcaacaacggtagtcaggccgtgggacgttcctccttctactgcctggagtacttcccctctcagatgctgagaacgggcaacaacttttccttcagctacactttcgaggacgtgcctttccacagcagctacgcgcacagccagagtttggacaggctgatgaatcctctcatcgaccagtacctgtactacctgtcaagaacccagtctacgggaggcacagcgggaacccagcagttgctgttttctcaggccgggcctagcaacatgtcgactcaggccagaaactggctgcctggaccctgctacagacagcagcgcgtctccacgacactgtcgcaaaacaacaacagcaactttgcctggactggtgccaccaagtatcatctgaacggcagagactctctggtgaatccgggcgtcgccatggcaaccaacaaggacgacgaggaccgcttcttcccatccagcggcatcctcatgtttggcaagcagggagctggaaaagacaacgtggactatagcaacgtgatgctaaccagcgaggaagaaatcaagaccaccaaccccgtggccacagaacagtatggcgtggtggctgataacctacagcagcaaaacaccgctcctattgtgggggccgtcaacagccagggagccttacctggcatggtctggcagaaccgggacgtgtacctgcagggtcctatttgggccaagattcctcacacagatggcaactttcacccgtctcctttaatgggcggctttggacttaaacatccgcctcctcagatccttatcaaaaacactcctgttcctgcggatcctccaacagcgttcaaccaggccaagctgaattctttcatcacgcagtacagcaccggacaagtcagcgtggagatcgagtgggagctgcagaaggagaacagcaagcgctggaacccagagattcagtatacttccaactactacaaatctacaaatgtggactttgctgttaatactgagggtgcttactctgagcctcgccccattggcactcgttacctcacccgtaatctgtaa

SEQ ID NO: 457 - protein, 737 aa, synthetic construct
  REGION 1..737: note = source = /note="Description of Artificial Sequence: Synthetic polypeptide"
MAADGYLPDWLEDNLSEGIREWWDLKPGAPKPKANQQKQDDGRGLVLPGYKYLGPFNGLDKGEPVNAADAAALEHDKAYDQQLKAGDNPYLRYNHADAEFQERLQEDTSFGGNLGRAVFQAKKRVLEPLGLVEEAAKTAPGKKRPVEPSPQRSPDSSTGIGKKGQQPARKRLNFGQTGDSESVPDPQPIGEPPAGPSGLGSGTMAAGGGAPMADNNEGADGVGNASGNWHCDSTWLGDRVITTSTRTWALPTYNNHLYKQISSQSAGSTNDNVYFGYSTPWGYFDFNRFHCHFSPRDWQRLINNNWGFRPKKLNFKLFNIQVKEVTTNDGVTTIANNLTSTVQVFSDSEYQLPYVLGSAHQGCLPPFPADVFMIPQYGYLTLNNGSQAVGRSSFYCLEYFPSQMLRTGNNFSFSYTFEDVPFHSSYAHSQSLDRLMNPLIDQYLYYLSRTQSTGGTAGTQQLLFSQAGPSNMSTQARNWLPGPCYRQQRVSTTLSQNNNSNFAWTGATKYHLNGRDSLVNPGVAMATNKDDEDRFFPSSGILMFGKQGAGKDNVDYSNVMLTSEEEIKTTNPVATEQYGVVADNLQQQNTAPIVGAVNSQGALPGMVWQNRDVYLQGPIWAKIPHTDGNFHPSPLMGGFGLKHPPPQILIKNTPVPADPPTAFNQAKLNSFITQYSTGQVSVEIEWELQKENSKRWNPEIQYTSNYYKSTNVDFAVNTEGAYSEPRPIGTRYLTRNL

SEQ ID NO: 458 - DNA, 2217 bp, synthetic construct
  misc_feature 1..2217: note = source = /note="Description of Artificial Sequence: Synthetic polynucleotide"
  source 1..2217: mol_type = other DNA
atggctgccgatggttatcttccagattggctcgaggacaacctctctgagggcattcgcgagtggtgggacctgaaacctggagccccgaaacccaaagccaaccagcaaaagcaggacgacggccggggtctggtgcttcctggctacaagtacctcggacccttcaacggactcgacaagggggagcccgtcaacgcggcggacgcagcggccctcgagcacgacaaggcctacgaccagcagctcaaagcgggtgacaatccgtacctgcggtataatcacgccgacgccgagtttcaggagcgtctgcaagaagatacgtcttttgggggcaacctcgggcgagcagtcttccaggccaagaagcgggttctcgaacctctcggtctggttgaggaaggcgctaagacggctcctggaaagaagagaccggtagagccgtcaccacagcgttcccccgactcctccacgggcatcggcaagaaaggccagcagcccgccagaaagagactcaatttcggtcagactggcgactcagagtcagtccccgaccctcaacctatcggagaacctccagcagcgccctctagtgtgggatctggtacaatggctgcaggcggtggcgcaccaatggcagacaataacgaaggtgccgacggagtgggtagttcctcgggaaattggcattgcgattccacatggctgggcgacagagtcatcaccaccagcacccgaacctgggccctgcccacctacaacaaccacctctacaagcaaatctccaacgggacctcgggaggcagcaccaacgacaacacctactttggctacagcaccccctgggggtattttgactttaacagattccactgccacttctcaccacgtgactggcagcgactcatcaacaacaactggggattccggcccaagagactcagcttcaagctcttcaacatccaggtcaaagaggtcacgcagaatgaaggcaccaagaccatcgccaataacctcaccagcaccatccaggtgtttacggactcggaataccagctgccgtacgtcctcggctctgcccaccagggctgcctgcctccgttcccggcggacgtcttcatgattcctcagtacggctacctgactctcaacaacggtagtcaggccgtgggacgttcctccttctactgcctggagtacttcccctctcagatgctgagaacgggcaacaacttttccttcagctacactttcgaggacgtgcctttccacagcagctacgcgcacagccagagtttggacaggctgatgaatcctctcatcgaccagtacctgtactacctgtcaagaacccagtctacgggaggcacagcgggaacccagcagttgctgttttctcaggccgggcctagcaacatgtcggctcaggccagaaactggctgcctggaccctgctacagacagcagcgcgtctccacgacactgtcgcaaaacaacaacagcaactttgcctggactggtgccaccaagtatcatctgaacggcagagactctctggtgaatccgggcgtcgccatggcaaccaacaaggacgacgaggaccgcttcttcccatccagcggcatcctcatgtttggcaagcagggagctggaaaagacaacgtggactatagcaacgtgatgctaaccagcgaggaagaaatcaaggccaccaaccccgtggccacagaacagtatggcgtggtggctgataacctacagcagcaaaacaccgctcctattgtgggggccgtcaacagccagggagccttacctggcatggtctggcagaaccgggacgtgtacctgcagggtcctatttgggccaagattcctcacacagatggcaactttcacccgtctcctttaatgggcggctttggacttaaacatccgcctcctcagatcctcatcaaaaacactcctgttcctgcggatcctccaacagcgttcaaccaggccaagctgaattctttcatcacgcagtacagcaccggacaagtcagcgtggagatcgagtgggagctgcagaaggagaacagcaagcgctggaacccagagattcagtatacttccaactactacaaatctacaaatgtggactttgctgttaatactgagggtgtttactctgagcctcgccccattggcactcgttacctcacccgtaatctgtaa

SEQ ID NO: 459 - protein, 738 aa, synthetic construct
  REGION 1..738: note = source = /note="Description of Artificial Sequence: Synthetic polypeptide"
MAADGYLPDWLEDNLSEGIREWWDLKPGAPKPKANQQKQDDGRGLVLPGYKYLGPFNGLDKGEPVNAADAAALEHDKAYDQQLKAGDNPYLRYNHADAEFQERLQEDTSFGGNLGRAVFQAKKRVLEPLGLVEEGAKTAPGKKRPVEPSPQRSPDSSTGIGKKGQQPARKRLNFGQTGDSESVPDPQPIGEPPAAPSSVGSGTMAAGGGAPMADNNEGADGVGSSSGNWHCDSTWLGDRVITTSTRTWALPTYNNHLYKQISNGTSGGSTNDNTYFGYSTPWGYFDFNRFHCHFSPRDWQRLINNNWGFRPKRLSFKLFNIQVKEVTQNEGTKTIANNLTSTIQVFTDSEYQLPYVLGSAHQGCLPPFPADVFMIPQYGYLTLNNGSQAVGRSSFYCLEYFPSQMLRTGNNFSFSYTFEDVPFHSSYAHSQSLDRLMNPLIDQYLYYLSRTQSTGGTAGTQQLLFSQAGPSNMSAQARNWLPGPCYRQQRVSTTLSQNNNSNFAWTGATKYHLNGRDSLVNPGVAMATNKDDEDRFFPSSGILMFGKQGAGKDNVDYSNVMLTSEEEIKATNPVATEQYGVVADNLQQQNTAPIVGAVNSQGALPGMVWQNRDVYLQGPIWAKIPHTDGNFHPSPLMGGFGLKHPPPQILIKNTPVPADPPTAFNQAKLNSFITQYSTGQVSVEIEWELQKENSKRWNPEIQYTSNYYKSTNVDFAVNTEGVYSEPRPIGTRYLTRNL

SEQ ID NO: 460 - DNA, 2217 bp, synthetic construct
  misc_feature 1..2217: note = source = /note="Description of Artificial Sequence: Synthetic polynucleotide"
  source 1..2217: mol_type = other DNA
atggctgccgatggttatcttccagattggctcgaggacaacctctctgagggcattcgcgagtggtgggacctgaaacctggagccccgaaacccaaagccaaccagcaaaagcaggacgacggccggggtctggtgcttcctggctacaagcacctcggacccttcaacggactcgacaagggggagcccgtcaacgcggcggacgcagcggccctcgagcacgacaaggcctacgaccagcagctcaaagcgggtgacaatccgtacctgcggtataatcacgctgacgccgagtttcaggagcgtctgcaagaagatacgtcttttgggggcaacctcgggcgagcagtcttccaggccaagaagcgggttctcgaacctctcggtctggttgaggaaggcgctaagacggctcctggaaagaagagaccggtagagccgtcaccacagcgttcccccgactcctccacgggcatcggcaagaaaggccagcagcccgccagaaagagactcaatttcggtcagactggcgactcagagtcagtccccgaccctcaacctatcggagaacctccagcagcgccctctagtgtgggatctggtacaatggctgcaggcggtggcgcaccaatggcagacaataacgaaggtgccgacggagtgggtagttcctcgggaaattggcattgcgattccacatggctgggcgacagagtcatcaccaccagcacccgaacctgggccctgcccacctacaacaaccacctctacaagcaaatctccaacgggacctcgggaggcagcaccaacgacaacacctactttggctacagcaccccctgggggtattttgactttaacagattccactgccacttctcaccacgtgactggcagcgactcatcaacaacaactggggattccggcccaagagactcagcttcaagctcttcaacatccaggtcaaagaggtcacgcagaatgaaggcaccaagaccatcgccaataaccttaccagcacggttcaggtcttttcggactcggaataccagctgccctacgtcctcggctccgcacaccagggctgcctgcctccgttcccggcggacgtcttcatgattccccagtacggctacctgactctgaacaatggcagccaatcggtgggtcgttcctctttctactgcctggaatatttcccttctcaaatgctgagaacgggcaacaacttcaccttcagctacaccttcgaggacgttcccttccacagcagctacgcacacagccagagcctggaccggctgatgaatcctcttatcgaccagtacctgtattacctggccagaacacagagcaacgcaggaggcacagctggcaatcgggaactgcagttttatcagggcgggcctaccaccatggccgaacaagccaaaaactggctgcctggaccttgcttccggcaacaaagagtctccaagacgctggatcaaaacaacaacagcaactttgcttggactggtgccaccaaataccatctaaatggaagaaattcattggttaatcccggtgtcgccatggcaacccacaaggacgacgaggaacgcttcttcccttcgagcggagtcctgatttttggaaaaactggagcagctaataagactacactggaaaatgtgttaatgacaaatgaagaggaaattcgtcctaccaacccggtagccaccgaggaatacgggactgttagcagcaacctgcaggcggctaacactgcagcccagacacaagttgtcaacaaccagggagccttacctggtatggtctggcagaaccgggacgtgtacctgcagggtcccatctgggccaagattcctcacacggacggcaactttcacccgtctccgctgatgggcggctttggactgaagcatccgcctcctcagatcctgatcaaaaacactcctgttcctgctaatcccccggaggtgtttacgcctgccaagtttgcttctttcatcacacagtacagcaccggccaggtcagcgtggagatcgagtgggagctgcagaaggagaacagcaagcgctggaacccagagattcagtatacctccaattttgacaaacagactggtgtggactttgccgttgacagccagggtgtttattctgagcctcgccccattggtactcgttacctcacccgtaatctgtaa

SEQ ID NO: 461 - protein, 738 aa, synthetic construct
  REGION 1..738: note = source = /note="Description of Artificial Sequence: Synthetic polypeptide"
MAADGYLPDWLEDNLSEGIREWWDLKPGAPKPKANQQKQDDGRGLVLPGYKHLGPFNGLDKGEPVNAADAAALEHDKAYDQQLKAGDNPYLRYNHADAEFQERLQEDTSFGGNLGRAVFQAKKRVLEPLGLVEEGAKTAPGKKRPVEPSPQRSPDSSTGIGKKGQQPARKRLNFGQTGDSESVPDPQPIGEPPAAPSSVGSGTMAAGGGAPMADNNEGADGVGSSSGNWHCDSTWLGDRVITTSTRTWALPTYNNHLYKQISNGTSGGSTNDNTYFGYSTPWGYFDFNRFHCHFSPRDWQRLINNNWGFRPKRLSFKLFNIQVKEVTQNEGTKTIANNLTSTVQVFSDSEYQLPYVLGSAHQGCLPPFPADVFMIPQYGYLTLNNGSQSVGRSSFYCLEYFPSQMLRTGNNFTFSYTFEDVPFHSSYAHSQSLDRLMNPLIDQYLYYLARTQSNAGGTAGNRELQFYQGGPTTMAEQAKNWLPGPCFRQQRVSKTLDQNNNSNFAWTGATKYHLNGRNSLVNPGVAMATHKDDEERFFPSSGVLIFGKTGAANKTTLENVLMTNEEEIRPTNPVATEEYGTVSSNLQAANTAAQTQVVNNQGALPGMVWQNRDVYLQGPIWAKIPHTDGNFHPSPLMGGFGLKHPPPQILIKNTPVPANPPEVFTPAKFASFITQYSTGQVSVEIEWELQKENSKRWNPEIQYTSNFDKQTGVDFAVDSQGVYSEPRPIGTRYLTRNL

SEQ ID NO: 462 - protein, 737 aa, synthetic construct
  REGION 1..737: note = source = /note="Description of Artificial Sequence: Synthetic polypeptide"
MAADGYLPDWLEDNLSEGIREWWDLKPGAPKPKANQQKQDDGRGLVLPGYKYLGPFNGLDKGEPVNAADAAALEHDKAYDQQLKAGDNPYLRYNHADAEFQERLQEDTSFGGNLGRAVFQAKKRVLEPLGLVEEAAKTAPGKKRPVEPSPQRSPDSSTGIGKKGQQPARKRLNFGQTGDSESVPDPQPIGEPPAGPSGLGSGTMAAGGGAPMADNNKGADGVGNASGNWHCDSTWLGDRVITTSTRTWALPTYNNHLYKQISSQSAGSTNDNVYFGYSTPWGYFDFNRFHCHFSPRDWQRLINSNWGFRPKKLNFKLFNIQVKEVTTNDGVTTIANNLTSTVQVFSDSEYQLPYVLGSAHQGCLPPFPADVFMIPQYGYLTLNNGSQSVGRSSFYCLEYFPSQMLRTGNNFTFSYTFEDVPFHSSYAHSQSLDRLMNPLIDQYLYYLARTQSNAGGTAGNRELQFYQGGPTTMAEQAKNWLPGPCFRQQRVSKTLDQNNNSNFAWTGATKYHLNGRNSLVNPGVAMATHKDDEERFFPSSGVLIFGKTGAANKTTLENVLMTNEEEIRPTNPVATEEYGTVSSNLQAANTAAQTQVVNNQGALPGMVWQNRDVYLQGPIWAKIPHTDGNFHPSPLMGGFGLKHPPPQILIKNTPVPANPPEVFTPAKFASFITQYSTGQVSVEIEWELQKENSKRWNPEIQYTSNFDKQTGVDFAVDSQGVYSEPRPIGTRYLTRNL

SEQ ID NO: 463 - protein, 737 aa, synthetic construct
  REGION 1..737: note = source = /note="Description of Artificial Sequence: Synthetic polypeptide"
MAADGYLPDWLEDNLSEGIREWWDLKPGAPKPKANQQKQDDGRGLVLPGYKYLGPFNGLDKGEPVNAADAAALEHDKAYDQQLKAGDNPYLRYNHADAEFQERLQEDTSFGGNLGRAVFQAKKRVLEPLGLVEEAAKTAPGKKRPVEPSPQRSPDSSTGIGKKGQQPARKRLNFGQTGDSESVPDPQPIGEPPAGPSGLGSGTMAAGGGAPMADNNEGADGVGNASGNWHCDSTWLGDRVITTSTRTWALPTYNNHLYKQISSQSAGSTNDNVYFGYSTPWGYFDFNRFHCHFSPRDWQRLINSNWGFRPKKLNFKLFNIQVKEVTTNDGVTTIANNLTSTVQVFSDSEYQLPYVLGSAHQGCLPPFPADVFMIPQYGYLTLNNGSQSVGRSSFYCLEYFPSQMLRTGNNFTFSYTFEDVPFHSSYAHSQSLDRLMNPLIDQYLYYLARTQSNAGGTAGNRELQFYQGGPTTMAEQAKNWLPGPCFRQQRVSKTLDQNNNSNFAWTGATKYHLNGRNSLVNPGVAMATHKDDEERFFPSSGVLIFGKTGAANKTTLENVLMTNEEEIRPTNPVATEEYGTVSSNLQAANTAAQTQVVNNQGALPGMVWQNRDVYLQGPIWAKIPHTDGNFHPSPLMGGFGLKHPPPQILIKNTPVPANPPEVFTPAKFASFITQYSTGQVSVEIEWELQKENSKRWNPEIQYTSNFDKQTGVDFAVDSQGVYSEPRPIGTRYLTRNL

SEQ ID NO: 464 - protein, 737 aa, synthetic construct
  REGION 1..737: note = source = /note="Description of Artificial Sequence: Synthetic polypeptide"
MAADGYLPDWLEDNLSEGIREWWDLKPGAPKPKANQQKQDDGRGLVLPGYKYLGPFNGLDKGEPVNAADAAALEHDKAYDQQLKAGDNPYLRYNHADAEFQERLQEDTSFGGNLGRAVFQAKKRVLEPLGLVEEAAKTAPGKKRPVEPSPQRSPDSSTGIGKKGQQPARKRLNFGQTGDSESVPDPQPIGEPPAGPSGLGSGTMAAGGGAPMADNNEGADGVGNASGNWHCDSTWLGDRVITTSTRTWALPTYNNHLYKQISSQSAGSTNDNVYFGYSTPWGYFDFNRFHCHFSPRDWQRLINNNWGFRPKKLNFKLFNIQVKEVTTNDGVTTIANNLTSTVQVFSDSEYQLPYVLGSAHQGCLPPFPADVFMIPQYGYLTLNNGSQSVGRSSFYCLEYFPSQMLRTGNNFTFSYTFEDVPFHSSYAHSQSLDRLMNPLIDQYLYYLARTQSNAGGTAGNRELQFYQGGPTTMAEQAKNWLPGPCFRQQRVSKTLDQNNNSNFAWTGATKYHLNGRNSLVNPGVAMATHKDDEERFFPSSGVLIFGKTGAANKTTLENVLMTNEEEIRPTNPVATEEYGTVSSNLQAANTAAQTQVVNNQGALPGMVWQNRDVYLQGPIWAKIPHTDGNFHPSPLMGGFGLKHPPPQILIKNTPVPANPPEVFTPAKFASFITQYSTGQVSVEIEWELQKENSKRWNPEIQYTSNFDKQTGVDFAVDSQGVYSEPRPIGTRYLTRNL

SEQ ID NO: 465 - protein, 737 aa, synthetic construct
  REGION 1..737: note = source = /note="Description of Artificial Sequence: Synthetic polypeptide"
MAADGYLPDWLEDNLSEGIREWWDLKPGAPKPKANQQKQDDGRGLVLPGYKYLGPFNGLDKGEPVNAADAAALEHDKAYDQQLKAGDNPYLRYNHADAEFQERLQEDTSFGGNLGRAVFQAKKRVLEPLGLVEEAAKTAPGKKRPVEPSPQRSPDSSTGIGKKGQQPARKRLNFGQTGDSESVPDPQPIGEPPAGPSGLGSGTMAAGGGAPMADNNKGADGVGNASGNWHCDSTWLGDRVITTSTRTWALPTYNNHLYKQISSQSAGSTNDNVYFGYSTPWGYFDFNRFHCHFSPRDWQRLINNNWGFRPKKLNFKLFNIQVKEVTTNDGVTTIANNLTSTVQVFSDSEYQLPYVLGSAHQGCLPPFPADVFMIPQYGYLTLNNGSQSVGRSSFYCLEYFPSQMLRTGNNFTFSYTFEDVPFHSSYAHSQSLDRLMNPLIDQYLYYLARTQSNAGGTAGNRELQFYQGGPTTMAEQAKNWLPGPCFRQQRVSKTLDQNNNSNFAWTGATKYHLNGRNSLVNPGVAMATHKDDEERFFPSSGVLIFGKTGAANKTTLENVLMTNEEEIRPTNPVATEEYGTVSSNLQAANTAAQTQVVNNQGALPGMVWQNRDVYLQGPIWAKIPHTDGNFHPSPLMGGFGLKHPPPQILIKNTPVPANPPEVFTPAKFASFITQYSTGQVSVEIEWELQKENSKRWNPEIQYTSNFDKQTGVDFAVDSQGVYSEPRPIGTRYLTRNL

SEQ ID NO: 466 - DNA, 2214 bp, synthetic construct
  misc_feature 1..2214: note = source = /note="Description of Artificial Sequence: Synthetic polynucleotide"
  source 1..2214: mol_type = other DNA
atggctgctgacggttatcttccagattggctcgaggacaacctctctgagggcattcgcgagtggtgggacctgaaacctggagcccccaagcccaaggccaaccagcagaagcaggacgacggccggggtctggtgcttcctggctacaagtacctcggacccttcaacggactcgacaagggggagcccgtcaacgcggcggacgcagcggccctcgagcacgacaaggcctacgaccagcagctcaaagcgggtgacaatccgtacctgcggtataaccacgccgacgccgagtttcaggagcgtctgcaagaagatacgtcttttgggggcaacctcgggcgagcagtcttccaggccaagaagcgggttctcgaacctctcggtctggttgaggaagctgctaagacggctcctggaaagaagagaccggtagaaccgtcacctcagcgttcccccgactcctccacgggcatcggcaagaaaggccagcagcccgctagaaagagactgaactttgggcagactggcgactcagagtcagtccccgaccctcaaccaatcggagaaccaccagcaggcccctctggtctgggatctggtacaatggctgcaggcggtggcgcaccaatggctgacaataacaagggcgccgacggagtgggtaatgcctcaggaaattggcattgcgattccacatggctgggcgacagagtcatcaccaccagcacccgaacctgggctttgcccacctacaacaaccacctctacaagcaaatctccagtcagtcagcaggtagcaccaacgacaacgtctacttcggctacagcaccccctgggggtattttgacttcaacagattccactgtcacttctcaccacgtgactggcagcggctcatcaacagcaactggggattccggcccaagaagctcaacttcaagctgttcaacatccaggtcaaggaggtcacaacgaatgacggcgtcacgaccatcgccaataaccttaccagcacggttcaggtcttttcggactcggaataccagctgccctacgtcctcggctccgcacaccagggctgcctgcctccgttcccggcggacgtcttcatgattccccagtacggctacctgactctgaacaatggcagccaatcggtgggtcgttcctctttctactgcctggaatatttcccttctcaaatgctgagaacgggcaacaacttcaccttcagctacaccttcgaggacgttcccttccacagcagctacgcacacagccagagcctggaccggctgatgaatcctcttatcgaccagtacctgtattacctggccagaacacagagcaacgcaggaggcacagctggcaatcgggaactgcagttttatcagggcgggcctaccaccatggccgaacaagccaaaaactggctgcctggaccttgcttccggcaacaaagagtctccaagacgctggatcaaaacaacaacagcaactttgcttggactggtgccaccaaataccatctaaatggaagaaattcattggttaatcccggtgtcgccatggcaacccacaaggacgacgaggaacgcttcttcccttcgagcggagtcctgatttttggaaaaactggagcagctaataagactacactggaaaatgtgttaatgacaaatgaagaggaaattcgtcctaccaacccggtagccaccgaggaatacgggactgttagcagcaacctgcaggcggctaacactgcagcccagacacaagttgtcaacaaccagggagccttacctggtatggtctggcagaaccgggacgtgtacctgcagggtcccatctgggccaagattcctcacacggacggcaactttcacccgtctccgctgatgggcggctttggactgaagcatccgcctcctcagatcctgatcaaaaacactcctgttcctgctaatcccccggaggtgtttacgcctgccaagtttgcttctttcatcacacagtacagcaccggccaggtcagcgtggagatcgagtgggagctgcagaaggagaacagcaagcgctggaacccagagattcagtatacctccaattttgacaaacagactggtgtggactttgccgttgacagccagggtgtttattctgagcctcgccccattggtactcgttacctcacccgtaatctgtaa

SEQ ID NO: 467 - DNA, 2217 bp, synthetic construct
  misc_feature 1..2217: note = source = /note="Description of Artificial Sequence: Synthetic polynucleotide"
  source 1..2217: mol_type = other DNA
atggctgccgatggttatcttccagattggctcgaggacaacctctctgagggcattcgcgagtggtgggacctgaaacctggagccccgaaacccaaagccaaccagcaaaagcaggacgacggccggggtctggtgcttcctggctacaagtacctcggacccttcaacggactcgacaagggggagcccgtcaacgcggcggacgcagcggccctcgagcacgacaaggcctacgaccagcagctcaaagcgggtgacaatccgcacctgcggtataatcacgccgacgccgagtttcaggagcgtctgcaagaagatacgtcttttgggggcaacctcgggcgagcagtcttccaggccaagaagcgggttctcgaacctctcggtctggttgaggaaggcgctaagacggctcctggaaagaagagaccggtagagccgtcaccacagcgttcccccgactcctccacgggcatcggcaagaaaggccagcagcccgccagaaagagactcaatttcggtcagactggcgactcagagtcagtccccgaccctcaacttatcggagaacctccagcagcgccctctagtgtgggatctggtacaatggctgcaggcggtggcgcaccaatggcagacaataacgaaggtgccgacggagtgggtagttcctcgggaaattggcattgcgattccacatggctgggcgacagagtcatcaccaccagcacccgaacctgggccctgcccacctacaacaaccacctctacaagcaaatctccaacgggacctcgggaggcagcaccaacgacaacacctactttggctacagcaccccctgggggtattttgactttaacagattccactgccacttctcaccacgtgactggcagcgactcatcaacaacaactggggattccggcccaagagactcagcttcaagctcttcaacatccaggtcaaagaggtcacgcagaatgaaggcaccaagaccatcgccaataacctcaccagcaccatccaggtgtttacggactcggagtaccagctgccgtacgtcctcggctctgcccaccagggctgcctgcctccgttcccggcggacgtcttcatgattcctcagtacggcaacctgactctcaacaacggtagtcaggccgtgggacgttcctccttctactgcctggagtacttcccctctcagatgctgagaacgggcaacaacttttccttcagctacactttcgaggacgtgcctttccacagcagctacgcgcacagccagagtttggacaggctgatgaatcctctcatcgaccagtacctgtactacctgtcaagaacccagtctacgggaggcacagcgggaacccagcagttgctgttttctcaggccgggcctagcaacatgtcggctcaggccagaaactggctgcctggaccctgctacagacagcagcgcgtctccacgacactgtcgcaaaacaacaacagcaactttgcctggactggtgccaccaagtatcatctgaacggcagagactctctggtgaatccgggcgtcgccatggcaaccaacaaggacgacgaggaccgcttcttcccatccagcggcatcctcatgtttggcaagcagggagctggaaaagacaacatgggctatagcaacgtgatgctaaccagcgaggaagaaatcaagaccaccaaccccgtggccacagaacagtatggcgtggtggctgataacctacagcagcaaaacaccgctcctattgtgggggccgtcaacagccagggagccttacctggcatggtctggcagaaccgggacgtgtacctgcagggtcctatttgggccaagattcctcacacagatggcaactttcacccgtctcctttaatgggcggctttggacttaaacatccgcctcctcagatcctcatcaaaaacactcctgttcctgcggatcctccaacagcgttcaaccaggccaagctgaattctttcatcacgcagtacggcaccggacaagtcagcgtggagatcgagtgggagctgcagaaggagaacagcaagcgctggaacccagagattcagtatacttccaactactacaaatctacaaatgtggactttgctgttaatactgagggtgtttactctgagcctcgccccattggcactcgttacctcacccgtaatctgtaa

SEQ ID NO: 468 - protein, 738 aa, synthetic construct
  REGION 1..738: note = source = /note="Description of Artificial Sequence: Synthetic polypeptide"
MAADGYLPDWLEDNLSEGIREWWDLKPGAPKPKANQQKQDDGRGLVLPGYKYLGPFNGLDKGEPVNAADAAALEHDKAYDQQLKAGDNPHLRYNHADAEFQERLQEDTSFGGNLGRAVFQAKKRVLEPLGLVEEGAKTAPGKKRPVEPSPQRSPDSSTGIGKKGQQPARKRLNFGQTGDSESVPDPQLIGEPPAAPSSVGSGTMAAGGGAPMADNNEGADGVGSSSGNWHCDSTWLGDRVITTSTRTWALPTYNNHLYKQISNGTSGGSTNDNTYFGYSTPWGYFDFNRFHCHFSPRDWQRLINNNWGFRPKRLSFKLFNIQVKEVTQNEGTKTIANNLTSTIQVFTDSEYQLPYVLGSAHQGCLPPFPADVFMIPQYGNLTLNNGSQAVGRSSFYCLEYFPSQMLRTGNNFSFSYTFEDVPFHSSYAHSQSLDRLMNPLIDQYLYYLSRTQSTGGTAGTQQLLFSQAGPSNMSAQARNWLPGPCYRQQRVSTTLSQNNNSNFAWTGATKYHLNGRDSLVNPGVAMATNKDDEDRFFPSSGILMFGKQGAGKDNMGYSNVMLTSEEEIKTTNPVATEQYGVVADNLQQQNTAPIVGAVNSQGALPGMVWQNRDVYLQGPIWAKIPHTDGNFHPSPLMGGFGLKHPPPQILIKNTPVPADPPTAFNQAKLNSFITQYGTGQVSVEIEWELQKENSKRWNPEIQYTSNYYKSTNVDFAVNTEGVYSEPRPIGTRYLTRNL

SEQ ID NO: 469 - DNA, 2217 bp, synthetic construct
  misc_feature 1..2217: note = source = /note="Description of Artificial Sequence: Synthetic polynucleotide"
  source 1..2217: mol_type = other DNA
atggctgccgatggttatcttccagattggctcgaggacaacctctctgagggcattcgcgagtggtgggacctgaaacctggagccccgaaacccaaagccaaccagcaaaagcaggacgacggccggggtctggtgcttcctggctacaagtacctcggacccttcaacggactcgacaagggggagcccgtcaacgcggcggacgcagcggccctcgagcacgacaaggcctacgaccagcagctcaaagcgggtgacaatccgtacctgcggtataatcacgccgacgccgagtttcaggagcgtctgcaagaagatacgtcttttgggggcaacctcgggcgagcagtcttccaggccaagaagcgggttctcgaacctctcggtctggttgaggaaggcgctaagacggctcctggaaagaagagaccggtagagccgtcaccacagcgttcccccgactcctccacgggcatcggcaagaaaggccagcagcccgccggaaagagactcaatttcggtcagactggcgactcagagtcagtccccgaccctcaacctatcggagaacctccagcagcgccctctagtgtgggatctggtacaatggctgcaggcggtggcgcaccaatggcagacaataacgaaggtgccgacggagtgggtagttcctcgggaaattggcattgcgattccacatggctgggcgacagagtcatcaccaccagcacccgaacctgggccctgcccacctacaacaaccacctctacaagcaaatctccaacgggacctcgggaggcagcaccaacgacaacacctactttggctacagcaccccctgggggtattttgactttaacagattccactgccacttctcaccacgtgactggcagcgactcatcaacaacaactggggattccggcccaagagactcagcttcaagctcttcaacatccaggtcaaagaggtcacgcagaatgaaggcaccaagaccatcgccaataacctcaccagcaccatccaggtgtttacggactcggaataccagctgccgtacgtcctcggctctgcccaccagggctgcctgcctccgttcccggcggacgtcttcatgattcctcagtacggctacctgactctcaacaacggtagtcaggccgtgggacgttcctccttctactgcctggagtacttcccctctcagatgctgagaacgggcaacaacttttccttcagctacactttcgaggacgtgcctttccacagcagctacgcgcacagccagagtttggacaggctgatgaatcctctcgtcgaccagtacctgtactacctgtcaagaacccagtctacgggaggcacagcgggaacccagcagttgctgttttctcaggccgggcctagcaacatgtcggctcaggccagaaactggctgcctggaccctgctacagacagcagcgcgtctccacgacactgtcgcaaaacaacaacagcaactttgcctggactggtgccaccaagtatcatctgaacggcagagactctctggtgaatccgggcgtcgccatggcaaccaacaaggacgacgaggaccgcttcttcccatccagcggcatcctcatgtttggcaagcagggagctggaaaagacaacgtggactatagcaacgtgatgctaaccagcgaggaagaaatcaagaccaccaaccccgtggccacagaacagtatggcgtggtggctgataacctacagcagcaaaacaccgctcctattgtgggggccgtcaacagccagggagccttacctggcatggtctggcagaaccgggacgtgtacctgcagggtcctatttgggccaagattcctcacacagatggcaactttcacccgtctcctttaatgggcggctttggacttaaacatccgcctcctcagatcctcatcaaaaacactcctgttcctgcggatcctccaacagcgttcaaccaggccaagctgaattctttcatcacgcagtacagcaccggacaagtcagcgtggagatcgagtgggagctgcagaaggagaacagcaagcgctggagcccagagattcagtatacttccaactactacaaatctacaaatgtggactttgctgttaatactgagggtgtttactctgagcctcgccccattggcactcgttacctcacccgtaatctgtaa

SEQ ID NO: 470 - protein, 738 aa, synthetic construct
  REGION 1..738: note = source = /note="Description of Artificial Sequence: Synthetic polypeptide"
MAADGYLPDWLEDNLSEGIREWWDLKPGAPKPKANQQKQDDGRGLVLPGYKYLGPFNGLDKGEPVNAADAAALEHDKAYDQQLKAGDNPYLRYNHADAEFQERLQEDTSFGGNLGRAVFQAKKRVLEPLGLVEEGAKTAPGKKRPVEPSPQRSPDSSTGIGKKGQQPAGKRLNFGQTGDSESVPDPQPIGEPPAAPSSVGSGTMAAGGGAPMADNNEGADGVGSSSGNWHCDSTWLGDRVITTSTRTWALPTYNNHLYKQISNGTSGGSTNDNTYFGYSTPWGYFDFNRFHCHFSPRDWQRLINNNWGFRPKRLSFKLFNIQVKEVTQNEGTKTIANNLTSTIQVFTDSEYQLPYVLGSAHQGCLPPFPADVFMIPQYGYLTLNNGSQAVGRSSFYCLEYFPSQMLRTGNNFSFSYTFEDVPFHSSYAHSQSLDRLMNPLVDQYLYYLSRTQSTGGTAGTQQLLFSQAGPSNMSAQARNWLPGPCYRQQRVSTTLSQNNNSNFAWTGATKYHLNGRDSLVNPGVAMATNKDDEDRFFPSSGILMFGKQGAGKDNVDYSNVMLTSEEEIKTTNPVATEQYGVVADNLQQQNTAPIVGAVNSQGALPGMVWQNRDVYLQGPIWAKIPHTDGNFHPSPLMGGFGLKHPPPQILIKNTPVPADPPTAFNQAKLNSFITQYSTGQVSVEIEWELQKENSKRWSPEIQYTSNYYKSTNVDFAVNTEGVYSEPRPIGTRYLTRNL

SEQ ID NO: 471 - DNA, 2217 bp, synthetic construct
  misc_feature 1..2217: note = source = /note="Description of Artificial Sequence: Synthetic polynucleotide"
  source 1..2217: mol_type = other DNA
atggttgccgatggttatcttccagattggctcgaggacaacctctctgagggcattcgcgagtggtgggacctgaaacctggagccccgaaacccaaagccaaccagcaaaagcagggcgacggccggggtctggtgcttcctggctacaagtacctcggacccttcaacggactcgacaagggggagcccgtcaacgcggcggacgcagcggccctcgagcacgacaaggcctacgaccagcagcttaaagcgggtgacaatccgtacctgcggtataatcacgccgacgccgagcttcaggagcgtctgcaagaagatacgtcttttgggggcaacctcgggcgagcagtcttccaggccaagaagcgggttctcgaacctctcggtctggttgaggaaggcgctaagacggctcctggaaagaagagaccggtagagccgtcaccacagcgttcccccgactcctccacgggcatcggcaagaaaggccagcagcccgccagaaagagactcaatttcggtcagactggcgactcagagtcagtccccgaccctcaacctatcggagaacctccagcagcgccctctagtgtgggatctggtacaatggctgcaggcggtggcgcgccaatggcagacaataacgaaggtgccgacggagtgggtagttcctcgggaaattggcattgcgattccacatggctgggcgacagagtcatcaccaccagcacccgaacctgggccctgcccacctacaacaaccacctctacaagcaaatctccaacgggacctcgggaggcagcaccaacgacaacacctactttggctacagcaccccctgggggtattttgactttaacagattccactgccacttctcaccacgtgactggcagcgactcatcaacaacaactggggattccggcccaagagactcagcttcaagctcttcaacatccaggtcaaagaggtcacgcagaatgaaggcaccaagaccatcgccaataacctcaccagcaccatccaggtgtttacggactcggaataccagctgccgtacgtcctcggctctgcccaccagggctgccagcctccgttcccggcggacgtcttcatgattcctcagtacggctacctgactctcaacaacggtagtcaggccgtgggacgttcctccttctactgcctggagtacttcccctctcagatgctgagaacgggcaacaacttttccttcagctacactttcgaggacgtgcctttccacagcagctacgcgcacagccagagtttggacaggctgatgaatcctctcatcgaccagtacctgtactacctgtcaagaacccagtctacgggaggcacagcgggaacccagcagttgctgttttctcaggccgggcctagcaacatgtcggctcaggccagaaactggctgcctggaccctgctacagacagcagcgcgtctccacgacactgtcgcaaaacaacaacagcaactttgcctggactggtgccaccaagtatcatctgaacggcagagactctctggtgaatccgggcgtcgccatggcaaccaacaaggacgacgaggaccgcttcttcccatccagcggcatcctcatgtttggcaagcagggagctggaaaagacaacgtggactatagcaacgtgatgctaaccagcgaggaagaaatcaagaccaccaaccccgtggccacagaacagtatggcgtggtggctgataacctacagcagcaaaacaccgctcctattgtgggggccgtcaacagccagggagccttacctggcatggtctggcagaaccgggacgtgtacctgcagggtcctatttgggccaagattcctcacacagatggcaactttcacccgtctcctttaatgggcggctttggacttaaacatccgcctcctcagatcctcatcaaaaacactcctgttcctgcggatcctccaacagcgttcaaccaggccaagctgaattctttcatcacgcagtacagcaccggacaagtcagcgtggagatcgagtgggagccgcagaaggagaacagcaagcgctggaacccagagattcagtatacttccaactactacaaatctacaaatgtggactttgctgttaatactgagggtgtttactctgagcctcgccccattggcactcgttacctcacccgtaatctgtaa

SEQ ID NO: 472 - protein, 738 aa, synthetic construct
  REGION 1..738: note = source = /note="Description of Artificial Sequence: Synthetic polypeptide"
MVADGYLPDWLEDNLSEGIREWWDLKPGAPKPKANQQKQGDGRGLVLPGYKYLGPFNGLDKGEPVNAADAAALEHDKAYDQQLKAGDNPYLRYNHADAELQERLQEDTSFGGNLGRAVFQAKKRVLEPLGLVEEGAKTAPGKKRPVEPSPQRSPDSSTGIGKKGQQPARKRLNFGQTGDSESVPDPQPIGEPPAAPSSVGSGTMAAGGGAPMADNNEGADGVGSSSGNWHCDSTWLGDRVITTSTRTWALPTYNNHLYKQISNGTSGGSTNDNTYFGYSTPWGYFDFNRFHCHFSPRDWQRLINNNWGFRPKRLSFKLFNIQVKEVTQNEGTKTIANNLTSTIQVFTDSEYQLPYVLGSAHQGCQPPFPADVFMIPQYGYLTLNNGSQAVGRSSFYCLEYFPSQMLRTGNNFSFSYTFEDVPFHSSYAHSQSLDRLMNPLIDQYLYYLSRTQSTGGTAGTQQLLFSQAGPSNMSAQARNWLPGPCYRQQRVSTTLSQNNNSNFAWTGATKYHLNGRDSLVNPGVAMATNKDDEDRFFPSSGILMFGKQGAGKDNVDYSNVMLTSEEEIKTTNPVATEQYGVVADNLQQQNTAPIVGAVNSQGALPGMVWQNRDVYLQGPIWAKIPHTDGNFHPSPLMGGFGLKHPPPQILIKNTPVPADPPTAFNQAKLNSFITQYSTGQVSVEIEWEPQKENSKRWNPEIQYTSNYYKSTNVDFAVNTEGVYSEPRPIGTRYLTRNL

SEQ ID NO: 473 - DNA, 2217 bp, synthetic construct
  misc_feature 1..2217: note = source = /note="Description of Artificial Sequence: Synthetic polynucleotide"
  source 1..2217: mol_type = other DNA
atggctgccgatggttatcttccagattggctcgaggacaacctctctgagggcattcgcgagtggtgggacctgaaacctggagccccgaaacccaaagccaaccagcaaaagcaggacgacggccggggtctggtgcttcctggctacaagtacctcggacccttcaacggactcgacaagggggagcccgtcaacgcggcggacgcagcggccctcgagcacgacaaggcctacgaccagcagctcaaagcgggtgacaatccgtacctgcggtataatcacgccgacgccgagtttcaggagcgtctgcaagaagatacgtcttttgggggcaacctcgggcgagcagtcttccaggccaagaagcgggttctcgaacctctcggtctggttgaggaaggcgctaagacggctcctggaaagaagagaccggtagagccgtcaccacagcgttcccccgactcctccacgggcatcggcaagaaaggccagcagcccgccagaaagagactcaatttcggtcagactggcgactcagagtcagtccccgaccctcaacctatcggagaacctccagcagcgccctctagtgtgggatctggtacaatggctgcaggcggtggcgcaccaatggcagacaataacgaaggtgccgacggagtgggtagttcctcgggaaattggcattgcgattccacatggctgggcgacagagtcatcaccaccagcacccgaacctgggccctgcccacctacaacaaccacctctacaagcaaatctccaacgggacctcgggaggcagcaccaacgacaacacctactttggctacagcaccccctgggggtattttgactttaacagattccactgccacttctcaccacgtgactggcagcgactcatcaacaacaactggggattccggcccaagagactcagcttcaagctcttcaacatccaggtcaaagaggtcacgcagaatgaaggcaccaagaccatcgccaatagcctcaccagcaccatccaggtgtttacggactcggaataccagctgccgtacgtcctcggctctgcccaccagggctgcctgcctccgttcccggcggacgtcttcatgattcctcagtacggctacctgactcccaacaacggtagtcaggccgtgggacgttcctccttctactgcctggagtacttcccctctcagatgctgagaacgggcaacaacttttccttcagctacactttcgaggacgtgcctttccacagcagctacgcgcacagccagagtttggacaggctgatgaatcctctcatcgaccagtacctgtactacctgtcaagaacccagtctacgggaggcacagcgggaacccagcagttgctgtcttctcaggccgggcctagcaacatgtcggctcaggccagaaactggctgcctggaccctgctacagacagcagcgcgtctccacgacactgtcgcaaaacaacaacagcaactttgcctggactggtgccaccaagtatcatctgaacggcagagactctctggtgaatccgggcgtcgccatggcaaccaacaaggacgacgaggaccgcttcttcccatccagcggcatcctcatgtttggcaagcagggagctggaaaagacaacgtggactatagcaacgtgatgctaaccagcgaggaagaaatcaagaccaccaaccccgtggccacagaacagtatggcgtggtggctgataacctacagcagcaaaacaccgctcctattgtgggggccgtcaacagccagggagccttacctggcatggtctggcagaaccgggacgtgtacttgcagggtcctatttgggccaagattcctcacacagatggcaactttcacccgtctcctttaatgggcggctttggacttaaacatccgcctcctcagatcctcatcaaaaacactcctgttcctgcggatcctccaacagcgttcaaccaggccaagctgaattctttcatcacgcagtacagcaccggacaagtcagcgtggagatcgagtgggagctgcagaaggagaacagcaagcgctggaacccagagattcagtatacttccaactactacaaatctacaaatgtggactttgctgttaatactgagggtgtttactctgagcctcgccccattggcactcgttacctcacccgtaatctgtaa

SEQ ID NO: 474 - protein, 738 aa, synthetic construct
  REGION 1..738: note = source = /note="Description of Artificial Sequence: Synthetic polypeptide"
MAADGYLPDWLEDNLSEGIREWWDLKPGAPKPKANQQKQDDGRGLVLPGYKYLGPFNGLDKGEPVNAADAAALEHDKAYDQQLKAGDNPYLRYNHADAEFQERLQEDTSFGGNLGRAVFQAKKRVLEPLGLVEEGAKTAPGKKRPVEPSPQRSPDSSTGIGKKGQQPARKRLNFGQTGDSESVPDPQPIGEPPAAPSSVGSGTMAAGGGAPMADNNEGADGVGSSSGNWHCDSTWLGDRVITTSTRTWALPTYNNHLYKQISNGTSGGSTNDNTYFGYSTPWGYFDFNRFHCHFSPRDWQRLINNNWGFRPKRLSFKLFNIQVKEVTQNEGTKTIANSLTSTIQVFTDSEYQLPYVLGSAHQGCLPPFPADVFMIPQYGYLTPNNGSQAVGRSSFYCLEYFPSQMLRTGNNFSFSYTFEDVPFHSSYAHSQSLDRLMNPLIDQYLYYLSRTQSTGGTAGTQQLLSSQAGPSNMSAQARNWLPGPCYRQQRVSTTLSQNNNSNFAWTGATKYHLNGRDSLVNPGVAMATNKDDEDRFFPSSGILMFGKQGAGKDNVDYSNVMLTSEEEIKTTNPVATEQYGVVADNLQQQNTAPIVGAVNSQGALPGMVWQNRDVYLQGPIWAKIPHTDGNFHPSPLMGGFGLKHPPPQILIKNTPVPADPPTAFNQAKLNSFITQYSTGQVSVEIEWELQKENSKRWNPEIQYTSNYYKSTNVDFAVNTEGVYSEPRPIGTRYLTRNL

SEQ ID NO: 475 - protein, 738 aa, synthetic construct
  REGION 1..738: note = source = /note="Description of Artificial Sequence: Synthetic polypeptide"
MAADGYLPDWLEDNLSEGIREWWDLKPGAPKPKANQQKQDDGRGLVLPGYKYLGPFNGLDKGEPVNAADAAALEHDKAYDQQLKAGDNPYLRYNHADAEFQERLQEDTSFGGNLGRAVFQAKKRVLEPLGLVEEGAKTAPGKKRPVEPSPQRSPDSSTGIGKKGQQPARKRLNFGQTGDSESVPDPQPIGEPPAAPSSVGSGTMAAGGGAPMADNNEGADGVGSSSGNWHCDSTWLGDRVITTSTRTWALPTYNNHLYKQISNGTSGGSTNDNTYFGYSTPWGYFDFNRFHCHFSPRDWQRLINNNWGFRPKRLSFKLFNIQVKEVTQNEGTKTIANNLTSTIQVFTDSEYQLPYVLGSAHQGCLPPFPADVFMIPQYGYLTLNNGSQAVGRSSFYCLEYFPSQMLRTGNNFSFSYTFEDVPFHSSYVHSQSLDRLMNPLIDQYLYYLSRTQSTGGTAGTQQLLFSQAGPSNMSAQARNWLPGPCYRQQRVSTTLSQNNNSNFAWTGATKYHLNGRDSLVNSGVAMATNKDDEDRFFPSSGILMFGKQGAGKDNVDYSNVMLTSEEEIKTTNPVATEQYGVVADNLQQQNTAPIVGAVNSQGALPGMVWQNRDVYLQGPIWAKIPHTDGNFHPSPLMGGFGLKHPPPQILIKNTPVPADPPTAFNQAKLNSFITQYSTGQVSVEIEWELQKENSKRWNPEIQYTSNYYKSTNVDFAVNTEGVYSEPRPIGTRYPTRNL

SEQ ID NO: 476 - DNA, 2217 bp, synthetic construct
  misc_feature 1..2217: note = source = /note="Description of Artificial Sequence: Synthetic polynucleotide"
  source 1..2217: mol_type = other DNA
atggctgccgatggttatcttccagattggctcgaggacaacctctctgagggcattcgcgagtggtgggacctgaaacctggagccccgaaacccaaagccaaccagcaaaagcaggacgacggccggggtctggtgcttcctggctacaagtacctcggacccttcaacggactcgacaagggggagcccgtcaacgcggcggacgcagcggccctcgagcacgacaaggcctacgaccagcagctcaaagcgggtgacaatccgtacctgcggtataatcacgccgacgccgagtttcaggagcgtctgcaagaagatacgtcttttgggggcaacctcgggcgagcagtcttccaggccaagaagcgggttctcgaacctctcggtctggttgaggaaggcgctaagacggctcctggaaagaagagaccggtagagccgtcaccacagcgttcccccgactcctccacgggcatcggcaagaaaggccagcagcccgccagaaagagactcaatttcggtcagactggcgactcagagtcagtccccgaccctcaacctatcggagaacctccagcagcgccctctagtgtgggatctggtacaatggctgcaggcggtggcgcaccaatggcagacaataacgaaggtgccgacggagtgggtagttcctcgggaaattggcattgcgattccacatggctgggcgacagagtcatcaccaccagcacccgaacctgggccctgcccacctacaacaaccacctctacaagcaaatctccaacgggacctcgggaggcagcaccaacgacaacacctactttggctacagcaccccctgggggtattttgactttaacagattccactgccacttctcaccacgtgactggcagcgactcatcaacaacaactggggattccggcccaagagactcagcttcaagctcttcaacatccaggtcaaagaggtcacgcagaatgaaggcaccaagaccatcgccaataacctcaccagcaccatccaggtgtttacggactcggaataccagctgccgtacgtcctcggctctgcccaccagggctgcctgcctccgttcccggcggacgtcttcatgattcctcagtacggctacctgactctcaacaacggtagtcaggccgtgggacgttcctccttctactgcctggagtacttcccctctcagatgctgagaacgggcaacaacttttccttcagctacactttcgaggacgtgcctttccacagcagctacgtgcacagccagagtttggacaggctgatgaatcctctcatcgaccagtacctgtactacctgtcaagaacccagtctacgggaggcacagcgggaacccagcagttgctgttttctcaggccgggcctagcaacatgtcggctcaggccagaaactggctgcctggaccctgctacagacagcagcgcgtctccacgacactgtcgcaaaacaacaacagcaactttgcctggactggtgccaccaagtatcatctgaacggcagagactctctggtgaattcgggcgtcgccatggcaaccaacaaggacgacgaggaccgcttcttcccatccagcggcatcctcatgtttggcaagcagggagctggaaaagacaacgtggactatagcaacgtgatgctaaccagcgaggaagaaatcaagaccaccaaccccgtggccacagaacagtatggcgtggtggctgataacctacagcagcaaaacaccgctcctattgtgggggccgtcaacagccagggagccttacctggcatggtctggcagaaccgggacgtgtacctgcagggtcctatttgggccaagattcctcacacagatggcaactttcacccgtctcctttaatgggcggctttggacttaaacatccgcctcctcagatcctcatcaaaaacactcctgttcctgcggatcctccaacagcgttcaaccaggccaagctgaattctttcatcacgcagtacagcaccggacaagtcagcgtggagatcgagtgggagctgcagaaggagaacagcaagcgctggaacccagagattcagtatacttccaactactacaaatctacaaatgtggactttgctgttaatactgagggtgtttactctgagcctcgccccattggcactcgttaccccacccgtaatctgtaa

SEQ ID NO: 477 - protein, 734 aa, synthetic construct; identical to SEQ ID NO: 302
  REGION 1..734: note = source = /note="Description of Artificial Sequence: Synthetic polypeptide"

SEQ ID NO: 478 - DNA, 2214 bp, synthetic construct
  misc_feature 1..2214: note = source = /note="Description of Artificial Sequence: Synthetic polynucleotide"
  source 1..2214: mol_type = other DNA
atggctgctgacggttatcttccagattggctcgaggacaacctctctgagggcattcgcgagtggtgggacctgaaacctggagccccgaaacccaaagccaaccagcagaagcaggacgacggccggggtctggtgcttcctggctacaagtacctcggacccttcaacggactcgacaagggggagcccgtcaacgcggcggacgcagcggccctcgagcacgacaaggcctacgaccagcagctcaaagcgggtgacaatccgtacctgcggtataaccacgccgacgccgagtttcaggagcgtctgcaagaagatacgtcttttgggggcaacctcgggcgagcagtcttccaggccaagaagcgggttctcgaacctctcggtctggttgaggaagctgctaagacggctcctggaaagaagagaccggtagaaccgtcacctcagcgttcccccgactcctccacgggcatcggcaagaaaggccagcagcccgctagaaagagactgaactttgggcagactggcgactcagagtcagtccccgaccctcaacctctcggagaaccaccagcaggcccctctggtctgggatctggtacaatggctgcaggcggtggcgctccaatggcagacaataacgaaggcgccgacggagtgggtaatgcctcaggaaattggcattgcgattccacatggctgggcgacagagtcatcaccaccagcacccgaacctgggctttgcccacctacaacaaccacctctacaagcaaatctccagtcagtcagcaggtagcaccaacgacaacgtctacttcggctacagcaccccctgggggtattttgacttcaacagattccactgtcacttctcaccacgtgactggcagcgactcatcaacaacaactggggattccggcccaagaagctcaacttcaagctcttcaacatccaagtcaaggaggtcacgacgaatgacggcgtcacgaccatcgctaataaccttaccagcacggttcaggtcttttcggactcggagtaccagctgccgtacgtcctcggctctgcccaccagggctgcctgcctccgttcccggcggacgtcttcatgattcctcagtacggctacctgactctgaacaatggcagccaatcggtgggacgttcatccttctactgcctggaatacttcccttctcaggtgctgagaacgggtaacaacttcaccttcagttacaccttcgaggacgtgcctttccacagcagctacgcgcacagccagagcctagaccggctgatgaatcccctcatcgaccagtacctgtattacctggctagaacacagagtaacccaggaggcacatctggcaatcgggaactgcagttttaccagggcgggccttccaccatggccgaacaagccaagaactggttacctggaccttgcttccggcaacaaagagtttccaaaacactggatcaaaacaacaacagcaactttgcttggactggtgccaccaaatatcacctgaacggcagaaactcattggtgaatcctggtgtcgccatggcaactcacaaggacgacgaggaccgctttttcccatccagcggagtcctgatttttggaaaaactggagcaaccaacaagactacattggaaaacgtgttaatgacaaatgaagaagaaattcgtcctactaatcctgtggccacagaagaatacgggatagtcagcagcaatttacaagcggccaatactgcagcccagacacaagttgtcaacaaccagggagccttacctggcatggtctggcagaaccgggacgtgtacctgcagggtcccatctgggccaaaattcctcacacagacggcaactttcacccgtctccgctgatgggcggctttggactgaagcatccgcctcctcagatcctgatcaaaaacactcctgttcctgctaatcccccggaggtgtttacgcctgccaagtttgcttctttcatcacacagtacagcaccggccaggtcagcgtggagatcgagtgggagctgcagaaggagaacagcaagcgctggaacccagagattcagtatacctccaattttgacaaacagactggtgtggactttgccgttgacagccagggtgtttattctgagcctcgccccattggtactcgttacctcacccgtaatctgtaa

SEQ ID NO: 479 - protein, 737 aa, synthetic construct
  REGION 1..737: note = source = /note="Description of Artificial Sequence: Synthetic polypeptide"
MAADGYLPDWLEDNLSEGIREWWDLKPGAPKPKANQQKQDDGRGLVLPGYKYLGPFNGLDKGEPVNAADAAALEHDKAYDQQLKAGDNPYLRYNHADAEFQERLQEDTSFGGNLGRAVFQAKKRVLEPLGLVEEAAKTAPGKKRPVEPSPQRSPDSSTGIGKKGQQPARKRLNFGQTGDSESVPDPQPLGEPPAGPSGLGSGTMAAGGGAPMADNNEGADGVGNASGNWHCDSTWLGDRVITTSTRTWALPTYNNHLYKQISSQSAGSTNDNVYFGYSTPWGYFDFNRFHCHFSPRDWQRLINNNWGFRPKKLNFKLFNIQVKEVTTNDGVTTIANNLTSTVQVFSDSEYQLPYVLGSAHQGCLPPFPADVFMIPQYGYLTLNNGSQSVGRSSFYCLEYFPSQVLRTGNNFTFSYTFEDVPFHSSYAHSQSLDRLMNPLIDQYLYYLARTQSNPGGTSGNRELQFYQGGPSTMAEQAKNWLPGPCFRQQRVSKTLDQNNNSNFAWTGATKYHLNGRNSLVNPGVAMATHKDDEDRFFPSSGVLIFGKTGATNKTTLENVLMTNEEEIRPTNPVATEEYGIVSSNLQAANTAAQTQVVNNQGALPGMVWQNRDVYLQGPIWAKIPHTDGNFHPSPLMGGFGLKHPPPQILIKNTPVPANPPEVFTPAKFASFITQYSTGQVSVEIEWELQKENSKRWNPEIQYTSNFDKQTGVDFAVDSQGVYSEPRPIGTRYLTRNL

SEQ ID NO: 480 - DNA, 2214 bp, synthetic construct
  misc_feature 1..2214: note = source = /note="Description of Artificial Sequence: Synthetic polynucleotide"
  source 1..2214: mol_type = other DNA
atggctgccgatggttatcttccagattggctcgaggacaacctctctgagggcattcgcgagtggtgggacctgaaacctggagccccgaaacccaaagccaaccagcaaaagcaggacgacggccggggtctggtgcttcctggctacaagtacctcggacccttcaacggactcgacaagggggagcccgtcaacgcggcggacgcagcggccctcgagcacgacaaggcctacgaccagcagctcaaagcgggtgacaatccgtacctgcggtataatcacgccgacgccgagtttcaggagcgtctgcaagaagatacgtcttttgggggcaacctcgggcgagcagtcttccaggccaagaagcgggttctcgaacctctcggtctggttgaggaaggcgctaagacggctcctggaaagaagagaccggtagagccgtcaccacagcgttcccccgactcctccacgggcatcggcaagaaaggccagcagcccgccagaaagagactcaatttcggtcagactggcgactcagagtcagtccccgaccctcaacctatcggagaacctccagcagcgccctctagtgtgggatctggtacaatggctgcaggcggtggcgcaccaatggcagacaataacgaaggtgccgacggagtgggtagttcctcgggaaattggcattgcgattccacacggctgggcgacagagtcatcaccaccagcacccggacctgggctttgcccacctacaacaaccacctctacaagcaaatctccagtcagtcagcaggtagcaccaacgacaacgtctacttcggctacagcaccccctgggggtattttgacttcaacagattccactgtcacttctcaccacgtgactggcagcggctcatcaacaacaactggggattccggcccaagaagctcaacttcaagctgttcaacatccaggtcaaggaggtcacaacgaatgacggcgtcacgaccatcgccaataaccttaccagcacggttcaggtcttttcggactcggaataccagctgccctacgtcctcggctccgcacaccagggctgcctgcctccgttcccggcggacgtcttcatgattccccagtacggctacctgactctgaacaatggcagccaatcggtgggtcgttcctctttctactgcctggaatatttcccttctcaaatgctgagaacgggcaacaacttcaccttcagctacaccttcgaggacgttcccttccacagcagctacgcacacagccagagcctggaccggctgatgaatcctcttatcgaccagtacctgtattacctggccagaacacagagcaacgcaggaggcacagctggcaatcgggaactgcagttttatcagggcgggcctaccaccatggccgaacaagccaaaaactggctgcctggaccttgcttccggcaacgaagagtctccaagacgctggatcaaaacaacaacagcaactttgcttggactggtgccaccaaataccatctaaatggaagaaattcattggttaatcccggtgtcgccatggcaacccacaaggacgacgaggaacgcttcttcccttcgagcggagtcctgatttttggaaaaactggagcagctaataagactacactggaaaatgtgttaatgacaaatgaagaggaaattcgtcctaccaacccggtagccaccgaggaatacgggactgttagcagcaacctgcaggcggctaacactgcagcccagacacaagttgtcaacaaccagggagccttacctggtatggtctggcagaaccgggacgtgtacctgcagggtcccatctgggccaagattcctcacacggacggcaactttcacccgtctccgctgatgggcggctttggactgaagcatccgcctcctcagatcctgatcaaaaacactcctgttcctgctaatcccccggaggtgtttacgcctgccaagtttgcttctttcatcacacagtacagcaccggccaggtcagcgtggagatcgagtgggagctgcagaaggagaacagcaagcgctggaacccagagattcagtatacctccaattttgacaaacagactggtgtggactttgccgttgacagccagggtgtttattctgagcctcgccccattggtactcgttacctcacccgtaatctgtaa

SEQ ID NO: 481 - protein, 737 aa, synthetic construct
  REGION 1..737: note = source = /note="Description of Artificial Sequence: Synthetic polypeptide"
MAADGYLPDWLEDNLSEGIREWWDLKPGAPKPKANQQKQDDGRGLVLPGYKYLGPFNGLDKGEPVNAADAAALEHDKAYDQQLKAGDNPYLRYNHADAEFQERLQEDTSFGGNLGRAVFQAKKRVLEPLGLVEEGAKTAPGKKRPVEPSPQRSPDSSTGIGKKGQQPARKRLNFGQTGDSESVPDPQPIGEPPAAPSSVGSGTMAAGGGAPMADNNEGADGVGSSSGNWHCDSTRLGDRVITTSTRTWALPTYNNHLYKQISSQSAGSTNDNVYFGYSTPWGYFDFNRFHCHFSPRDWQRLINNNWGFRPKKLNFKLFNIQVKEVTTNDGVTTIANNLTSTVQVFSDSEYQLPYVLGSAHQGCLPPFPADVFMIPQYGYLTLNNGSQSVGRSSFYCLEYFPSQMLRTGNNFTFSYTFEDVPFHSSYAHSQSLDRLMNPLIDQYLYYLARTQSNAGGTAGNRELQFYQGGPTTMAEQAKNWLPGPCFRQRRVSKTLDQNNNSNFAWTGATKYHLNGRNSLVNPGVAMATHKDDEERFFPSSGVLIFGKTGAANKTTLENVLMTNEEEIRPTNPVATEEYGTVSSNLQAANTAAQTQVVNNQGALPGMVWQNRDVYLQGPIWAKIPHTDGNFHPSPLMGGFGLKHPPPQILIKNTPVPANPPEVFTPAKFASFITQYSTGQVSVEIEWELQKENSKRWNPEIQYTSNFDKQTGVDFAVDSQGVYSEPRPIGTRYLTRNL

SEQ ID NO: 482 - DNA, 2208 bp, synthetic construct
  misc_feature 1..2208: note = source = /note="Description of Artificial Sequence: Synthetic polynucleotide"
  source 1..2208: mol_type = other DNA
atggctgccgatggttatcttccagattggctcgaggacactctctctgaaggaataagacagtggtggaagctcaaacctggcccaccaccaccaaagcccgcagagcggcataaggacgacagcaggggtcttgtgcttcctgggtacaagtacctcggacccttcaacggactcgacaagggggagccggtcaacgaggcagacgccgcggccctcgagcacgacaaggcctacgaccggcagctcgacagcggagacaacccgtacctcaagtacaaccacgccgacgcggagtttcaggagcgtcttaaagaagatacgtcttttgggggcaacctcggacgagcagtcttccaggcgaaaaagagggttcttgaacctctgggcctggttgaggaacctgttaagacggctccgggaaaaaagaggccggtagagcactctcctgcggagccagactcctcctcgggaaccggaaaagcgggccagcagcctgcaagaaaaagattgaattttggtcagactggagacgcagactccgtacctgacccccagcctctcggacagccaccagcagccccctctggtttgggatctactacaatggctacaggcagtggcgcaccaatggcagacaataacgagggtgccgatggagtgggtaattcttcaggaaattggcattgcgattcccaatggctgggcgacagagtcatcaccaccagcacccgaacctgggcccagcccacctacaacaaccacctctacaagcaaatctcaagccaatcaggagcctcaaacgacaaccactactttggctacagcaccccttgggggtattttgacttcaacagattccactgccacttttcaccacgtgactggcaaagactcatcaacaacaactggggattccgacccaagagactcaacttcaagctctttaacattcaagtcaaagaggtcacgcagaatgacggtacgacgacgattgccaataaccttaccagcacggttcaggtgtttactgactcggagtaccagctcccgtacgtcctcgggtcggcgcatcaaggatgcctcccgccgtttccagcggacgtcttcatggtcccacagtatggatacctcaccctgaacaacgggagtcaggcggtaggacgctcttccttttactgcctggagtactttccttctcagatgcttcgtactggaaacaactttcagttcagctacacctttgaagacgttcctttccacagcagctacgctcacagccagagtctggatcggctgatgaatcctctgatcgaccagtacctgtattatctgaacaaaacacaatcaaatagtggagctcttcagcagtctcggctactgtttagtcaagctggacccaccagcatgtctcttcaagctaaaaactggctacctggaccttgctacagacagcagcgtctgtcaaagcaggcaaacgacaacaacaacagcaactttccctggactgcggctacaaagtaccacctaaatggccgggactcgttggttaatccaggaccagctatggccagtcacaaagacgatgaagaaaagtttttccccatgcatggaaccctgatatttggtaaacaaggaacaaatgctaacgacgcggatttggacaatgtcatgattacagatgaagaagaaatccgcaccaccaatcccgtggctacggagcagtacggatatgtgtcaaataatttgcaaaactcaaatactggtccaactactggaactgtcaatcaccgaggagcgttacctggcatggtgtggcaggatcgagacgtgtacctgcagggacccatttgggccaagattcctcacaccgatggacactttcatccttctccactgatgggaggttttgggctcaaacacccgcctcctcagatcatgatcaaaaacactcccgttccagccaatcctcccacaaacttcagttctgccaagtttgcttctttcatcacacagtattccacggggcaggtcagcgtggagatcgagtgggagctgcagaaagagaacagcaaacgctggaatcccgaaattcagtacacttccaactacaacaaatctgttaatgtggactttactgtggacactaatggcgtgtattcagagcctcgccccattggcaccagatacctgactcgtaatctgtaa

SEQ ID NO: 483 - protein, 735 aa, synthetic construct
  REGION 1..735: note = source = /note="Description of Artificial Sequence: Synthetic polypeptide"
MAADGYLPDWLEDTLSEGIRQWWKLKPGPPPPKPAERHKDDSRGLVLPGYKYLGPFNGLDKGEPVNEADAAALEHDKAYDRQLDSGDNPYLKYNHADAEFQERLKEDTSFGGNLGRAVFQAKKRVLEPLGLVEEPVKTAPGKKRPVEHSPAEPDSSSGTGKAGQQPARKRLNFGQTGDADSVPDPQPLGQPPAAPSGLGSTTMATGSGAPMADNNEGADGVGNSSGNWHCDSQWLGDRVITTSTRTWAQPTYNNHLYKQISSQSGASNDNHYFGYSTPWGYFDFNRFHCHFSPRDWQRLINNNWGFRPKRLNFKLFNIQVKEVTQNDGTTTIANNLTSTVQVFTDSEYQLPYVLGSAHQGCLPPFPADVFMVPQYGYLTLNNGSQAVGRSSFYCLEYFPSQMLRTGNNFQFSYTFEDVPFHSSYAHSQSLDRLMNPLIDQYLYYLNKTQSNSGALQQSRLLFSQAGPTSMSLQAKNWLPGPCYRQQRLSKQANDNNNSNFPWTAATKYHLNGRDSLVNPGPAMASHKDDEEKFFPMHGTLIFGKQGTNANDADLDNVMITDEEEIRTTNPVATEQYGYVSNNLQNSNTGPTTGTVNHRGALPGMVWQDRDVYLQGPIWAKIPHTDGHFHPSPLMGGFGLKHPPPQIMIKNTPVPANPPTNFSSAKFASFITQYSTGQVSVEIEWELQKENSKRWNPEIQYTSNYNKSVNVDFTVDTNGVYSEPRPIGTRYLTRNL

SEQ ID NO: 484 - DNA, 2217 bp, synthetic construct
  misc_feature 1..2217: note = source = /note="Description of Artificial Sequence: Synthetic polynucleotide"
  source 1..2217: mol_type = other DNA
atggctgccgatggttatcttccagattggctcgaggacaacctctctgagggcattcgcgagtggtgggcgctgaaacctggagccccgaagcccaaagccaaccagcaaaagcaggacgacggccggggtctggtgcttcctggctacaagtacctcggacccttcaacggactcgacaagggggagcccgtcaacgcggcggacgcagcggccctcgagcacgacaaggcctacgaccagcagctgcaggcgggtgacaatccgtacctgcggtataatcacgccgacgccgagtttcaggagcgtctgcaagaagatacgtcttttgggggcaacctcgggcgagcagtcttccaggccaagaagcgggttctcgaacctctcggtctggttgaggaaggcgctaagacggctcctggaaagaagagaccggtagagccgtcaccacagcgttcccccgactcctccacgggcatcggcaagaaaggccagcagcccgccagaaagagactcaatttcggtcagactggcgactcagagtcagtccccgaccctcaacctatcggagaacctccagcagcgccctctagtgtgggatctggtacaatggctgcaggcggtggcgcgccaatggcagacaataacgaaggtgccgacggagtgggtagttcctcgggaaattggcattgcgattccacatggctgggcgacagagtcatcaccaccagcacccgaacctgggccctgcccacctacaacaaccacctctacaagcaaacctccaacgggacctcgggaggcagcaccaacgacaacacctactttggctacagcaccccctgggggtattttgactttaacagattccactgccacttctcaccacgtgactggcagcgactcatcaacaacaactggggattccggcccaagagactcagcttcaagctcttcaacatccaggtcaaagaggtcacgcagaatgaaggcaccaagaccatcgccaataacctcaccagcaccatccaggtgtttacggactcggaataccagctgccgtacgtcctcggctctgcccaccagggctgcctgcctccgttcccggcggacgtcttcatgattcctcagtacggctacctgactctcaacaacggtagtcaggccgtgggacgttcctccttctactgcctggagtacttcccctctcagatgctgagaacgggcaacaacttttccttcagctacactttcgaggacgtgcctttccacagcagctacgcgcacagccagagtttggacaggctgatgaatcctctcatcgaccagtacctgtactacctgtcaagaacccagtctacgggaggcacagcgggaacccagcagttgctgttttctcaggccgggcctagcaacatgtcggctcaggccagaaactggctgcctggaccctgctacagacagcagcgcgtctccacgacactgtcgcaaaacaacaacagcaactttgcctggactggtgccaccaagtatcatctgaacggcagagactctctggtgaatccgggcgtcgccatggcaaccaacaaggacgacgaggaccgcttcttcccatccagcggcatcctcatgtttggcaagcagggagctggaaaagacaacgtggactatagcaacgtgatgctaaccagcgaggaagaaatcaagaccaccaaccccgtggccacagaacagtatggcgtggtggctgataacctacagcagcaaaacaccgctcctattgtgggggccgtcaacagccagggagccttacctggcatggtctggcagaaccgggacgtgtacctgcagggtcctatttgggccaagattcctcacacagatggcaactttcacccgtctcctttaatgggcggctttggacttaaacatccgcctcctcagatcctcatcaaaaacactcctgttcctgcggatcctccaacagcgttcaaccaggccaagctgaattctttcatcacgcagtacagcaccggacaagtcagcgcggagatcgagtgggagctgcagaaggagaacagcaagcgctggaacccagagattcagtatacttccaactactacaaatctacaaatgtggactttgctgttaatactgagggtgtttactctgagcctcgccccattggcactcgttacctcacccgtaatctgtaa

SEQ ID NO: 485 - protein, 738 aa, synthetic construct
  REGION 1..738: note = source = /note="Description of Artificial Sequence: Synthetic polypeptide"
MAADGYLPDWLEDNLSEGIREWWALKPGAPKPKANQQKQDDGRGLVLPGYKYLGPFNGLDKGEPVNAADAAALEHDKAYDQQLQAGDNPYLRYNHADAEFQERLQEDTSFGGNLGRAVFQAKKRVLEPLGLVEEGAKTAPGKKRPVEPSPQRSPDSSTGIGKKGQQPARKRLNFGQTGDSESVPDPQPIGEPPAAPSSVGSGTMAAGGGAPMADNNEGADGVGSSSGNWHCDSTWLGDRVITTSTRTWALPTYNNHLYKQTSNGTSGGSTNDNTYFGYSTPWGYFDFNRFHCHFSPRDWQRLINNNWGFRPKRLSFKLFNIQVKEVTQNEGTKTIANNLTSTIQVFTDSEYQLPYVLGSAHQGCLPPFPADVFMIPQYGYLTLNNGSQAVGRSSFYCLEYFPSQMLRTGNNFSFSYTFEDVPFHSSYAHSQSLDRLMNPLIDQYLYYLSRTQSTGGTAGTQQLLFSQAGPSNMSAQARNWLPGPCYRQQRVSTTLSQNNNSNFAWTGATKYHLNGRDSLVNPGVAMATNKDDEDRFFPSSGILMFGKQGAGKDNVDYSNVMLTSEEEIKTTNPVATEQYGVVADNLQQQNTAPIVGAVNSQGALPGMVWQNRDVYLQGPIWAKIPHTDGNFHPSPLMGGFGLKHPPPQILIKNTPVPADPPTAFNQAKLNSFITQYSTGQVSAEIEWELQKENSKRWNPEIQYTSNYYKSTNVDFAVNTEGVYSEPRPIGTRYLTRNL

SEQ ID NO: 486 - DNA, 2217 bp, synthetic construct
  misc_feature 1..2217: note = source = /note="Description of Artificial Sequence: Synthetic polynucleotide"
  source 1..2217: mol_type = other DNA
atggctgctgacggttatcttccagattggctcgaggacaacctctctgagggcattcgcgagtggtgggacctgaaacctggagcccccaagcccaaggccaaccagcagaagcaggacgacggccggggtctggtgcttcctggctacaagtacctcggacccttcaacggactcgacaagggggagcccgtcaacgcggcggacgcagcggccctcgagcacgacaaggcctacgaccagcagctcaaagcgggtgacaatccgtacctgcggtataatcacgccgacgccgagtttcaggagcgtctgcaagaagatacgtcttttgggggcaacctcgggcgagcagtcttccaggccaagaagcgggttctcgaacctctcggtctggttgaggaagctgctaagacggctcctggaaagaagagaccggtagaaccgtcacctcagcgttcccccgactcctccacgggcatcggcaagaaaggccagcagcccgctagaaagagactgaactttgggcagactggcgactcagagtcagtccccgaccctcaaccaatcggagaacctccagcagcgccctctagtgtgggatctggtacaatggccgcaggcggtggcgcaccaatggcagacaataacgaaggtgccgacggagtgggtagttcctcgggaaattggcattgcgattccacatggctgggcgacagagtcatcaccaccagcacccgaacctgggccctgcccacctacaacaaccacctctacaagcaaatctccaacgggacctcgggaggcagcaccaacgacaacacctactttggctacagcaccccctgggggtattttgactttaacagattccactgccacttctcaccacgtgactggcagcgactcatcaacaacaactggggattccggcccaagagactcagcttcaagctcttcaacatccaggtcaaagaggtcacgcagaatgaaggcaccaagaccatcgccaataacctcaccagcaccatccaggtgtttacggactcggaataccagctgccgtacgtcctcggctctgcccaccagggctgcctgcctccgttcccggcggacgtcttcatgattcctcagtacggctacctgactctcaacaacggtagtcaggccgtgggacgttcctccttctactgcctggagtacttcccctctcagatgctgagaacgggcaacaacttttccttcagctacactttcgaggacgtgcctttccacagcagctacgcgcacagccagagtttggacaggctgatgaatcctctcatcgaccagtacctgtactacctgtcaagaacccagtctacgggaggcacagcgggaacccagcagctgctgttttctcaggccgggcctagcaacatgtcggctcaggccagaaactggctgcctggaccctgctacagacagcagcgcgtctccacgacactgtcgcaaaacaacaacagcaactttgcctggactggtgccaccaagtatcatctgaacggcagagactctctggtgaatccgggcgtcgccatggcaaccaacaaggacgacgaggaccgcttcttcccatccagcggcatcctcatgtttggcaagcagggagctggaaaagacaacgtggactatagcaacgtgatgctaaccagcgaggaagaaatcaagaccaccaaccccgtggccacagaacagtatggcgtggtggctgataacctacagcagcaaaacaccgctcctattgtgggggccgtcaacagccagggagccttacctggcatggtctggcagaaccgggacgtgtacctgcagggtcctatttgggccaagattcctcacacagatggcaactttcacccgtctcctttaatgggcggctttggacttaaacatccgcctcctcagatcctcatcaaaagcactcctgttcctgcggatcctccaacagcgttcaaccaggccaagctgaattctttcatcacgcagtacagcaccggacaagtcagcgtggagatcgagtgggagctgcagaaggagaacagcaagtgctggaacccagagattcagtatacttccaactactacaaatctacaaatgtggactttgctgttaatactgagggtgtttactctgagcctcgccccattggcactcgttacctcacccgtaatctgtaa

SEQ ID NO: 487 - protein, 738 aa, synthetic construct
  REGION 1..738: note = source = /note="Description of Artificial Sequence: Synthetic polypeptide"
MAADGYLPDWLEDNLSEGIREWWDLKPGAPKPKANQQKQDDGRGLVLPGYKYLGPFNGLDKGEPVNAADAAALEHDKAYDQQLKAGDNPYLRYNHADAEFQERLQEDTSFGGNLGRAVFQAKKRVLEPLGLVEEAAKTAPGKKRPVEPSPQRSPDSSTGIGKKGQQPARKRLNFGQTGDSESVPDPQPIGEPPAAPSSVGSGTMAAGGGAPMADNNEGADGVGSSSGNWHCDSTWLGDRVITTSTRTWALPTYNNHLYKQISNGTSGGSTNDNTYFGYSTPWGYFDFNRFHCHFSPRDWQRLINNNWGFRPKRLSFKLFNIQVKEVTQNEGTKTIANNLTSTIQVFTDSEYQLPYVLGSAHQGCLPPFPADVFMIPQYGYLTLNNGSQAVGRSSFYCLEYFPSQMLRTGNNFSFSYTFEDVPFHSSYAHSQSLDRLMNPLIDQYLYYLSRTQSTGGTAGTQQLLFSQAGPSNMSAQARNWLPGPCYRQQRVSTTLSQNNNSNFAWTGATKYHLNGRDSLVNPGVAMATNKDDEDRFFPSSGILMFGKQGAGKDNVDYSNVMLTSEEEIKTTNPVATEQYGVVADNLQQQNTAPIVGAVNSQGALPGMVWQNRDVYLQGPIWAKIPHTDGNFHPSPLMGGFGLKHPPPQILIKSTPVPADPPTAFNQAKLNSFITQYSTGQVSVEIEWELQKENSKCWNPEIQYTSNYYKSTNVDFAVNTEGVYSEPRPIGTRYLTRNL

SEQ ID NO: 488 - protein, 738 aa, synthetic construct
  REGION 1..738: note = source = /note="Description of Artificial Sequence: Synthetic polypeptide"
MAADGYLPDWLEDNLSEGIREWWDLKPGAPKPKANQQKQDDGRGLVLPGYKYLGPFNGLDKGEPVNAADAAALEHDKAYDQQLKAGDNPYLRYNHADAEFQERLQEDTSFGGNLGRAVFQAKKRVLEPLGLVEEAAKTAPGKKRPVEPSPQRSPDSSTGIGKKGQQPARKRLNFGQTGDSESVPDPQPIGEPPAAPSSVGSGTMAAGGGAPMADNNEGADGVGSSSGNWHCDSTWLGDRVITTSTRTWALPTYNNHLYKQISNGTSGGSTNDNTYFGYSTPWGYFDFNRFHCHFSPRDWQRLINNNWGFRPKRLSFKLFNIQVKEVTQNEGTKTIANNLTSTIQVFTDSEYQLPYVLGSAHQGCLPPFPADVFMIPQYGYLTLNNGSQAVGRSSFYCLEYFPSQMLRTGNNFSFSYTFEDVPFHSSYAHSQSLDRLMNPLIDQYLYYLSRTQSTGGTAGTQQLLFSQAGPSNMSAQARNWLPGPCYRQQRVSTTLSQNNNSNFAWTGATKYHLNGRDSLVNPGVAMATNKDDEDRFFPSSGILMFGKQGAGKDNVDYSNVMLTSEEEIKTTNPVATEQYGVVADNLQQQNTAPIVGAVNSQGALPGMVWQNRDVYLQGPIWAKIPHTDGNFHPSPLMGGFGLKHPPPQILIKSTPVPADPPTAFNQAKLNSFITQYSTGQVSVEIEWELQKENSKRWNPEIQYTSNYYKSTNVDFAVNTEGVYSEPRPIGTRYLTRNL

SEQ ID NO: 489 - DNA, 2217 bp, synthetic construct
  misc_feature 1..2217: note = source = /note="Description of Artificial Sequence: Synthetic polynucleotide"
  source 1..2217: mol_type = other DNA
atggctgctgacggttatcttccagattggctcgaggacaacctctctgagggcattcgcgagtggtgggacctgaaacctggagcccccaagcccaaggccaaccagcagaagcaggacgacggccggggtctggtgcttcctggctacaagtacctcggacccttcaacggactcgacaagggggagcccgtcaacgcggcggacgcagcggccctcgagcacgacaaggcctacgaccagcagctcaaagcgggtgacaatccgtacctgcggtataaccacgccgacgccgagtttcaggagcgtctgcaagaagatacgtcttttgggggcaacctcgggcgagcagtcttccaggccaagaagcgggttctcgaacctctcggtctggttgaggaagctgctaagacggctcctggaaagaagagaccggtagaaccgtcacctcagcgttcccccgactcctccacgggcatcggcaagaaaggccagcagcccgctagaaagagactgaactttgggcagactggcgactcagagtcagtccccgaccctcaaccaatcggagaaccaccagcaggcccctctggtctgggatctggtacaatggctgcaggcggtggcgcaccaatggctgacaataacgagggcgccgacggagtgggtaatgcctcaggaaattggcattgcgattccacatggctgggcgacagagtcatcaccaccagcacccgaacctgggctttgcccacctacaacaaccacctctacaagcaaatctccagtcagtcagcaggtagcaccaacgacaacgtctacttcggctacagcaccccctgggggtattttgacttcaacagattccactgtcacttctcaccacgtgactggcagcggctcatcaacaacaactggggattccggcccaagaagctcaacttcaagctgttcaacatccaggtcaaggaggtcacaacgaatgacggcgtcacgaccatcgccaataaccctaccagcacggttcaggtcttttcggactcggaataccagctgccctacgtcctcggctccgcacaccagggctgcctgcctccgttcccggcggacgtcttcatgattccccagtacggctacctgactctgaacaatggcagccaatcggtgggtcgttcctctttctactgcctggaatatttcccttctcaaatgctgagaacgggcaacaacttcaccttcagctacaccttcgaggacgttcccttccacagcagctacgcacacagccagagcctggaccggctgatgaatcctcttatcgaccagtacctgtattacctggccagaacacagagcaacgcaggaggcacagctggcaatcgggaactgcagttttatcagggcgggcctaccaccatggccgaacaagccaaaaactggctgcctggaccctgctacagacagcagcgcgtctccacgacactgtcgcaaaacaacaacagcaactttgcctggactggtgccaccaagtatcatctgaacggcagagactctctggtgaatccgggcgtcgccatggcaaccaacaaggacgacgaggaccgcttcttcccatccagcggcatcctcatgtttggcaagcagggagctggaaaagacaacgtggactatagcaacgtgatgctaaccagcgaggaagaaatcaagaccaccaaccccgtggccacagaacagtatggcgtggtggctgataacctacagcagcaaaacaccgctcctattgtgggggccgtcaacagccagggagccttacctggcatggtctggcagaaccgggacgtgtacctgcagggtcctatttgggccaagattcctcacacagatggcaactttcacccgtctcctttaatgggcggctttggacttaaacatccgcctcctcagatcctcatcaaaaacactcctgttcctgcggatcctccaacagcgttcaaccaggccaagctgaattctttcatcacgcagtacagcaccggacaagtcagcgtggagatcgagtgggagctgcagaaggagaacagcaagcgctggaacccagagattcagtatacttccaactactacaaatctacaaatgtggactttgctgttaatactgagggtgtttactctgagcctcgccccattggcactcgttacctcacccgtaatctgtaa

SEQ ID NO: 490 - protein, 738 aa, synthetic construct
  REGION 1..738: note = source = /note="Description of Artificial Sequence: Synthetic polypeptide"
MAADGYLPDWLEDNLSEGIREWWDLKPGAPKPKANQQKQDDGRGLVLPGYKYLGPFNGLDKGEPVNAADAAALEHDKAYDQQLKAGDNPYLRYNHADAEFQERLQEDTSFGGNLGRAVFQAKKRVLEPLGLVEEAAKTAPGKKRPVEPSPQRSPDSSTGIGKKGQQPARKRLNFGQTGDSESVPDPQPIGEPPAGPSGLGSGTMAAGGGAPMADNNEGADGVGNASGNWHCDSTWLGDRVITTSTRTWALPTYNNHLYKQISSQSAGSTNDNVYFGYSTPWGYFDFNRFHCHFSPRDWQRLINNNWGFRPKKLNFKLFNIQVKEVTTNDGVTTIANNPTSTVQVFSDSEYQLPYVLGSAHQGCLPPFPADVFMIPQYGYLTLNNGSQSVGRSSFYCLEYFPSQMLRTGNNFTFSYTFEDVPFHSSYAHSQSLDRLMNPLIDQYLYYLARTQSNAGGTAGNRELQFYQGGPTTMAEQAKNWLPGPCYRQQRVSTTLSQNNNSNFAWTGATKYHLNGRDSLVNPGVAMATNKDDEDRFFPSSGILMFGKQGAGKDNVDYSNVMLTSEEEIKTTNPVATEQYGVVADNLQQQNTAPIVGAVNSQGALPGMVWQNRDVYLQGPIWAKIPHTDGNFHPSPLMGGFGLKHPPPQILIKNTPVPADPPTAFNQAKLNSFITQYSTGQVSVEIEWELQKENSKRWNPEIQYTSNYYKSTNVDFAVNTEGVYSEPRPIGTRYLTRNL

SEQ ID NO: 491 - DNA, 2208 bp, synthetic construct
  misc_feature 1..2208: note = source = /note="Description of Artificial Sequence: Synthetic polynucleotide"
  source 1..2208: mol_type = other DNA
atggctgccgatggttatcttccagattggctcgaggacaacctctctgagggcattcacgagtggtgggacccgaaacctggagccccgaaacccaaagccaaccagcaaaagcaggacgacggccggggtctggtgcttcctggctacaagtacctcggacccttcaacggactcgacaagggggagcccgtcaacgcggcggacgcagcggccctcgagcacgacaaggcctacgaccagcagctcaaagcgggtgacaatccgtacctgcggtataatcacgccgacgccgagtttcaggagcgtctgcaagaagatacgtcttttgggggcaacctcgggcgagcagtcttccaggccaagaagcgggttctcgaacctctcggtctggttgaggaaggcgctaagacggctcctggaaagaagagaccggtagagccgtcaccacagcgttcccccgactcctccacgggcatcggcaagaaaggccagcagcccgccagaaagagactcaatttcggtcagactggcgactcagagtcagtccccgaccctcaacctatcggagaacctccagcagcgccctctagtgtgggatctggtacaatggctgcaggcggtggcgcaccaatggcagacaataacgaaggtgccgacggagtgggtagttcctcgggaaattggcattgcgattccacatggctgggcgacagagtcatcaccaccagcacccgaacctgggccctgcccacccacaacaaccacctctacaagcaaatctccaacgggacctcgggaggcagcaccaacgacaacgtctacttcggctacagcaccccctgggggtattttgacttcaacagattccactgtcacttctcaccacgtgaccggcagcgactcatcaacaacaactggggattccggcccaagagactcagcttcaagctcttcaacatccaggtcaaagaggtcacgcagaatgaaggcaccaagaccatcgccaataacctcaccagcaccatccaggtgtttacggactcggaataccagctgccgtacgtcctcggctctgcccaccagggctgcctgcctccgttcccggcggacgtcttcatgattcctcagtacggctacctgactctcaacaacggtagtcaggccgtgggacgttcctccttctactgcctggagtacttcccctctcagatgctgagaacgggcaacaacttttccttcagctacactttcgaggacgtgcctttccacagcagctacgcgcacagccagagtttggacaggctgatgaatcctctcatcgaccagtacctgtactacctgtcaagaacccagtctacggaaggcacagcgggaacccagcagttgctgttttctcaggccgggcctagcaacatgtcggctcaggccagaaactggctgcctggaccctgctacagacagcagcgcgtctccacgacactgtcgcaaaacaacaacagcaactttgcctggactggtgccaccaagtatcatctgaacggcagagactctctggtgaatccgggcgtcgccatggcaacccacaaggacgacgaggaacgcttcttcccttcgagcggagtcctgatttttggaaaaactggagcagctaataagactacactggaaaatgtgttaatgacaaatgaagaggaaattcgtcctaccaacccggtagccaccgaggaatacgggactgttagcagcaacctgcaggcggctaacactgcagcccagacacaagttgtcaacaaccagggagccttacctggtatggtctggcagaaccgggacgtgtacctgcagggtcccatctgggccaagattcctcacacggacggcaactttcacccgtctccgctgatgggcggctttggactgaagcatcctcagatcctgatcaaaaacactcctgttcctgctaatcccccggaggtgtttacgcctgccaagtttgcttctttcatcacacagtacagcaccggccaggtcagcgtggagatcgagtgggagctgcagaaggagaacagcaagcgctggaacccagagattcagtatacctccaattttgacaaacagactggtgtggactttgccgttgacagccagggtgtttattctgagcctcgccccattggtactcgttacctcacccgtaatctgtaa

SEQ ID NO: 492 - protein, 735 aa, synthetic construct
  REGION 1..735: note = source = /note="Description of Artificial Sequence: Synthetic polypeptide"
MAADGYLPDWLEDNLSEGIHEWWDPKPGAPKPKANQQKQDDGRGLVLPGYKYLGPFNGLDKGEPVNAADAAALEHDKAYDQQLKAGDNPYLRYNHADAEFQERLQEDTSFGGNLGRAVFQAKKRVLEPLGLVEEGAKTAPGKKRPVEPSPQRSPDSSTGIGKKGQQPARKRLNFGQTGDSESVPDPQPIGEPPAAPSSVGSGTMAAGGGAPMADNNEGADGVGSSSGNWHCDSTWLGDRVITTSTRTWALPTHNNHLYKQISNGTSGGSTNDNVYFGYSTPWGYFDFNRFHCHFSPRDRQRLINNNWGFRPKRLSFKLFNIQVKEVTQNEGTKTIANNLTSTIQVFTDSEYQLPYVLGSAHQGCLPPFPADVFMIPQYGYLTLNNGSQAVGRSSFYCLEYFPSQMLRTGNNFSFSYTFEDVPFHSSYAHSQSLDRLMNPLIDQYLYYLSRTQSTEGTAGTQQLLFSQAGPSNMSAQARNWLPGPCYRQQRVSTTLSQNNNSNFAWTGATKYHLNGRDSLVNPGVAMATHKDDEERFFPSSGVLIFGKTGAANKTTLENVLMTNEEEIRPTNPVATEEYGTVSSNLQAANTAAQTQVVNNQGALPGMVWQNRDVYLQGPIWAKIPHTDGNFHPSPLMGGFGLKHPQILIKNTPVPANPPEVFTPAKFASFITQYSTGQVSVEIEWELQKENSKRWNPEIQYTSNFDKQTGVDFAVDSQGVYSEPRPIGTRYLTRNL

SEQ ID NO: 493 - protein, 738 aa, synthetic construct
  REGION 1..738: note = source = /note="Description of Artificial Sequence: Synthetic polypeptide"
MAADGYLPDWLEDNLSEGIREWWDLKPGAPKPKANQQKQDDGRGLVLPGYKYLGPFNGLDKGEPVNAADAAALEHDKAYDQQLKAGDNPYLRYNHADAEFQERLQEDTSFGGNLGRAVFQAKKRVLEPLGLVEEGAKTAPGKKRPVEPSPQRSPDSSTGIGKKGQQPARKRLNFGQTGDSESVPDPQPIGEPPAAPSSVGSGTMAAGGGAPMADNNEGADGVGSSSGNWHCDSTWLGDRVITTSTRTWALPTYNNHLYKQISNGTSGGSTNDNTYFGYSTPWGYFDFNRFHCHFSPRDWQRPINNNWGFRPKRLSFKLFNIQVKEVTQNEGTKTIANNLTSTIQVFTDSEYQLPYVLGSAHQGCLPPFPADVFMIPQYGYLTLNNGSQAVGRSSFYCLEYFPSQMLRTGNNFSFSYPFEDVPFHSSYAHSQSLDRLMNPLIDQYLYYLSRTQSTGGTAGTQQLLFSQAGPSNMSAQARNWLPGPCYRQQRVSTTLSQNNNSNFAWTGATKYHLNGRDSLVNPGVAMATNKDDEDRFFPSSGILMFGKQGAGKDNVDYSNVMLTSEEEIKTTNPVATEQYGVVADNLQQQDTAPIVGAVNSQGALPGMVWQNRDVYLQGPIWAKIPHTDGNFHPSPLMGGFGLKHPPPQVLIKNTPVPADPPTAFNQAKLNSFITQYSTGQVSVEIEWELQKENSKRWNPEIQYTSNYYKSTNVDFAVNTEGVYSEPRPIGTRYLTRNL

SEQ ID NO: 494 - DNA, 2217 bp, synthetic construct
  misc_feature 1..2217: note = source = /note="Description of Artificial Sequence: Synthetic polynucleotide"
  source 1..2217: mol_type = other DNA
atggctgccgatggttatcttccagattggctcgaggacaacctctctgagggcattcgcgagtggtgggacctgaaacctggagccccgaaacccaaggccaaccagcaaaagcaggacgacggccggggtctggtgcttcctggctacaagtacctcggacccttcaacggactcgacaagggggagcccgtcaacgcggcggacgcagcggccctcgagcacgacaaggcctacgaccagcagctcaaagcgggtgacaatccgtacctgcggtataatcacgccgacgccgagtttcaggagcgtctgcaagaagatacgtcttttgggggcaacctcgggcgagcagtcttccaggccaagaagcgggttctcgaacctctcggtctggttgaggaaggcgctaagacggctcctggaaagaagagaccggtagagccgtcaccacagcgttcccccgactcctccacgggcatcggcaagaaaggccagcagcccgccagaaagagactcaatttcggtcagactggcgactcagagtcagtccccgaccctcaacctatcggagaacctccagcagcgccctctagtgtgggatctggtacaatggctgcaggcggtggcgcaccaatggcagacaataacgaaggtgccgacggagtgggtagttcctcgggaaattggcattgcgattccacatggctgggcgacagagtcatcaccaccagcacccgaacctgggccctgcccacctacaacaaccacctctacaagcaaatctccaacgggacctcgggaggcagcaccaacgacaacacctactttggctacagcaccccctgggggtattttgactttaacagattccactgccacttctcaccacgtgactggcagcgacccatcaacaacaactggggattccggcccaagagactcagcttcaagctcttcaacatccaggtcaaagaggtcacgcagaatgaaggcaccaagaccatcgccaataacctcaccagcaccatccaggtgtttacggactcggaataccagctgccgtacgtcctcggctctgcccaccagggctgcctgcctccgttcccggcggacgtcttcatgattcctcagtacggctacctgactctcaacaacggtagtcaggccgtgggacgttcctccttctactgcctggagtacttcccctctcagatgctgagaacgggcaacaacttttccttcagctaccctttcgaggacgtgcctttccacagcagctacgcgcacagccagagtttggacaggctgatgaatcctctcatcgaccagtacctgtactacctgtcaagaacccagtctacgggaggcacagcgggaacccagcagttgctgttttctcaggccgggcctagcaacatgtcggctcaggccagaaactggctgcctggaccctgctacagacagcagcgcgtctccacgacactgtcgcaaaacaacaacagcaactttgcctggactggtgccaccaagtatcatctgaacggcagagactctctggtgaatccgggcgtcgccatggcaaccaacaaggacgacgaggaccgcttcttcccatccagcggcatcctcatgtttggcaagcagggagctggaaaagacaacgtggactatagcaacgtgatgctaaccagcgaggaagaaatcaagaccaccaaccccgtggccacagaacagtatggcgtggtggctgataacctacagcagcaagacaccgctcctattgtgggggccgtcaacagccagggagccttacctggcatggtctggcagaaccgggacgtgtacctgcagggtcctatttgggccaagattcctcacacagatggcaactttcacccgtctcctttaatgggcggctttggacttaaacatccgcctcctcaggtcctcatcaaaaacactcctgttcctgcggatcctccaacagcgttcaaccaggccaagctgaattctttcatcacgcagtacagcaccggacaagtcagcgtggagatcgagtgggagctgcagaaggagaacagcaagcgctggaacccagagattcagtatacttccaactactacaaatctacaaatgtggactttgctgttaatactgagggtgtttactctgagcctcgccccattggcactcgttacctcacccgtaatctgtaa

SEQ ID NO: 495 - DNA, 2214 bp, synthetic construct
  misc_feature 1..2214: note = source = /note="Description of Artificial Sequence: Synthetic polynucleotide"
  source 1..2214: mol_type = other DNA
atggctgctgacggttatcttccagattggctcgaggacaacctctctgagggcattcgcgagtggtgggacctgaaacctggagcccccaagcccaaggccaaccagcagaagcaggacgacggccggggtctggtgcttcctggctacaagtacctcggacccttcaacggactcgacaagggggagcccgtcaacgcggcggacgcagcggccctcgagcacgacaaggcctacgaccagcagctcaaagcgggtgacaatccgtacctgcggtataaccacgccgacgccgagttccaggagcgtctgcaagaagatacgtcttttgggggcaacctcgggcgagcagtcttccaggccaagaagcgggttctcgaacctctcggtctggctgaggaagctgctaagacggctcctggaaagaagagaccggtagaaccgtcacctcagcgttcccccgactcctccacgggcatcggcaagaaaggccagcagcccgctagaaagagactgaactttgggcagactggcgactcagagtcagtccccgaccctcaaccaatcggagagccaccagcaggcccctctggtctgggatctggtacaatggctgcaggcggtggcgcaccaatggctgacaataacaagggcgccgacggagtgggtaatgcctcaggaaattggcattgcgattccacatggctgggcgacagagtcatcaccaccagcacccgaacctgggctttgcccacctacaacaaccacctctacaagcaaatctccagtcagtcagcaggtagcaccaacgacaacgtctacttcggctacagcaccccctgggggtattttgacttcaacagattccactgtcacttctcaccacgtgactggcagcggctcatcaacaacaactggggattccggcccaagaagctcaacttcaagctgttcaacatccaggtcaaggaggtcacaacgggtgacggcgtcacgaccatcgccaataaccttaccagcacggttcaggtcttttcggactcggaataccagctgccctacgtcctcggctccgcacaccagggctgcctgcctccgttcccggcggacgtcttcatgattccccagtacggctacctgactctgaacaatgacagccaatcggtgggtcgttcctctttctactgcctggaatatttcccttctcaaatgctgagaacgggcaacaacttcaccttcagctacaccttcgaggacgttcccttccacagcagctacgcacacagccagagcctggaccggctgatgaatcctcttatcgaccagtacctgtattacctggccagaacacagagcaacgcaggaggcacagctggcaatcgggaactgcagttttatcagggcgggcctaccaccatggccgaacaagccaaaaactggctgcctggaccttgcttccggcaacaaagagtctccaagacgctggatcaaaacaacaacagcaactttgcttggactggtgccaccaaataccatctaaatggaagaaattcattggttaatcccggtgtcgccatggcaacccacaaggacgacgaggaacgcttcttcccttcgagcggagtcctgatttttggaaaaactggagcagctaataagactacactggaaaatgtgttaatgacaaatgaagaggaaattcgtcctaccaacccggtagccaccgaggaatacgggactgttagcagcaacctgcaggcggctaacactgcagcccagacacaagttgtcaacaaccagggagccttacctggtatggtctggcagaaccgggacgtgtacctgcagggtcccatctgggccaagattcctcacacggacggcaactttcacccgtctccgctgatgggcggctttggactgaagcatccgcctcctcagatcctgatcaaaaacactcctgttcctgctaatcccccggaggtgtttacgcctgccaagtttgcttctttcatcacacagtacagcaccggccaggtcagcgtggagatcgagtgggagctgcagaaggagaacagcaagcgctggaacccagagattcagtatacctccaattttgacaaacagactggtgtggactttgccgttgacagccagggtgtttattctgagcctcgccccattggtactcgttacctcacccgtaatctgtaa

SEQ ID NO: 496 - protein, 737 aa, synthetic construct
  REGION 1..737: note = source = /note="Description of Artificial Sequence: Synthetic polypeptide"
MAADGYLPDWLEDNLSEGIREWWDLKPGAPKPKANQQKQDDGRGLVLPGYKYLGPFNGLDKGEPVNAADAAALEHDKAYDQQLKAGDNPYLRYNHADAEFQERLQEDTSFGGNLGRAVFQAKKRVLEPLGLAEEAAKTAPGKKRPVEPSPQRSPDSSTGIGKKGQQPARKRLNFGQTGDSESVPDPQPIGEPPAGPSGLGSGTMAAGGGAPMADNNKGADGVGNASGNWHCDSTWLGDRVITTSTRTWALPTYNNHLYKQISSQSAGSTNDNVYFGYSTPWGYFDFNRFHCHFSPRDWQRLINNNWGFRPKKLNFKLFNIQVKEVTTGDGVTTIANNLTSTVQVFSDSEYQLPYVLGSAHQGCLPPFPADVFMIPQYGYLTLNNDSQSVGRSSFYCLEYFPSQMLRTGNNFTFSYTFEDVPFHSSYAHSQSLDRLMNPLIDQYLYYLARTQSNAGGTAGNRELQFYQGGPTTMAEQAKNWLPGPCFRQQRVSKTLDQNNNSNFAWTGATKYHLNGRNSLVNPGVAMATHKDDEERFFPSSGVLIFGKTGAANKTTLENVLMTNEEEIRPTNPVATEEYGTVSSNLQAANTAAQTQVVNNQGALPGMVWQNRDVYLQGPIWAKIPHTDGNFHPSPLMGGFGLKHPPPQILIKNTPVPANPPEVFTPAKFASFITQYSTGQVSVEIEWELQKENSKRWNPEIQYTSNFDKQTGVDFAVDSQGVYSEPRPIGTRYLTRNL

SEQ ID NO: 497 - DNA, 2217 bp, synthetic construct
  misc_feature 1..2217: note = source = /note="Description of Artificial Sequence: Synthetic polynucleotide"
  source 1..2217: mol_type = other DNA
atggctgccgatggttatcttccagattggctcgaggacaacctctctgagggcattcgcgagtggtgggacctgaaacctggagccccgaaacccaaagccaaccagcaaaagcaggacgacggccggggtctggtgcttcctggctacaagtacctcggacccttcaacggactcgacaagggggagcccgtcaacgcggcggacgcagcggccctcgagcacgacaaggcctacgaccagcagctcaaagcgggtgacaatccgtacctgcggtataatcacgccgacgccgagtttcaggagcgtctgcaagaagatacgtcttttgggggcaacctcgggcgagcagtcttccaggccaagaagcgggttctcgaacctctcggtctggttgaggaaggcgctaagacggctcctggaaagaagagaccggtagagccgtcaccacagcgttcccccgactcctccacgggcatcggcaagaaaggccagcagcccgccagaaagagactcaatttcggtcagactggcgactcagagtcagtccccgaccctcaacctatcggagaacctccagcagcgccctctagtgtgggatctggtacaatggctgcaggcggtggcgcaccaatggcagacaataacgaaggtgccgacggagtgggtagttcctcgggaaattggcattgcgattccacatggctgggcgacagagtcatcaccaccagcacccgaacctgggccctgcccacctacaacaaccacctctacaagcaaatctccaacgggacctcgggaggcagcaccaacgacaacacctactttggctacagcaccccctgggggtattttgactttaacagattccactgccacttctcaccacgtgactggcagcgactcatcaacaacaactggggattccggcccaagagactcagcttcaagctcttcaacatccaggtcaaagaggtcacgcagaatgaaggcaccaagaccatcgccaataacctcaccagcaccatccaggtgtttacggactcggaataccagctgccgtacgtcctcggctctgcccaccagggctgcctgcctccgttcccggcggacgtcttcatgattcctcagtacggctacctgactctcaacaacggtagtcaggccgtgggacgttcctccttctactgcctggagtacttcccctctcagatgctgagaacgggcaacaacttttccttcagctacactttcgaggacgtgcctttccacagcagctacgcgcacagccagagtttggacaggctgatgaatcctctcatcgaccagtacctgtactacctgtcaagaacccagtctacgggaggcacagcgggaacccagcagttgctgttttctcaggccgggcctagcaacatgtcggctcaggccagaaactggctgcctggaccctgctacagacagcagcgcgtctccacgacactgtcgcaaaacaacaacagcaactttgcctggactggtgccaccaagtatcatctgaacggcagagactctctggtgaatccgggcgtcgccatggcaaccaacaaggacgacgaggaccgcttcttcccatccagcggcatcctcatgtttggcaagcagggagctggaaaagacaacgtggactatagcaacgtgatgctaaccagcgaggaagaaatcaagaccaccaaccccgtggccacagaacagtatggcgtggtggctgataacctacagcagcaaaacaccgctcctattgtgggggccgtcaacagccagggagccttacctggcatggtctggcagaaccgggacgtgtacctgcagggtcctatttgggccaagattcctcacacagatggcaactttcacccgtctcctttaatgggcggctttggacttaaacatccgcctcctcagatcctcatcaaaaacactcctgttcctgcggatcctccaacagcgttcaaccaggccaagctgaattctttcatcacgcagtacagcaccggacaagtcagcgtggagatcgtgtgggagctgcagaaggagaacagcaagcgcaggaacccagagattcagtatacttccaactactacaaatctacaaatgtggactttgctgttaatactgagggtgtttactctgagcctcgccccattggcactcgttacctcacccgtaatctgtaa

SEQ ID NO: 498 - protein, 738 aa, synthetic construct
  REGION 1..738: note = source = /note="Description of Artificial Sequence: Synthetic polypeptide"
MAADGYLPDWLEDNLSEGIREWWDLKPGAPKPKANQQKQDDGRGLVLPGYKYLGPFNGLDKGEPVNAADAAALEHDKAYDQQLKAGDNPYLRYNHADAEFQERLQEDTSFGGNLGRAVFQAKKRVLEPLGLVEEGAKTAPGKKRPVEPSPQRSPDSSTGIGKKGQQPARKRLNFGQTGDSESVPDPQPIGEPPAAPSSVGSGTMAAGGGAPMADNNEGADGVGSSSGNWHCDSTWLGDRVITTSTRTWALPTYNNHLYKQISNGTSGGSTNDNTYFGYSTPWGYFDFNRFHCHFSPRDWQRLINNNWGFRPKRLSFKLFNIQVKEVTQNEGTKTIANNLTSTIQVFTDSEYQLPYVLGSAHQGCLPPFPADVFMIPQYGYLTLNNGSQAVGRSSFYCLEYFPSQMLRTGNNFSFSYTFEDVPFHSSYAHSQSLDRLMNPLIDQYLYYLSRTQSTGGTAGTQQLLFSQAGPSNMSAQARNWLPGPCYRQQRVSTTLSQNNNSNFAWTGATKYHLNGRDSLVNPGVAMATNKDDEDRFFPSSGILMFGKQGAGKDNVDYSNVMLTSEEEIKTTNPVATEQYGVVADNLQQQNTAPIVGAVNSQGALPGMVWQNRDVYLQGPIWAKIPHTDGNFHPSPLMGGFGLKHPPPQILIKNTPVPADPPTAFNQAKLNSFITQYSTGQVSVEIVWELQKENSKRRNPEIQYTSNYYKSTNVDFAVNTEGVYSEPRPIGTRYLTRNL

SEQ ID NO: 499 - protein, 738 aa, synthetic construct
  REGION 1..738: note = source = /note="Description of Artificial Sequence: Synthetic polypeptide"
MAADGYLPDWLEDNLSEGIREWWDLKPGAPKPKANQQKQDDGRGLVLPGYKYLGPFNGLDKGEPVNAADAAALEHDKAYDQQLKAGDNPYLRYNHADAEFQERLQEDTSFGGNLGRAVFQAKKRVLEPLGLVEEGAKTAPGKKRPVEPSPQRSPDSSTGIGKKGQQPARKRLNFGQTGDSESVPDPQPIGEPPAAPSSVGSGTMAAGGGAPMADNNEGADGVGSSSGNWHCDSTWLGDRVITTSTRTWALPTYNNHLYKQISNGTSGGSTNDNTYFGYSTPWGYFDFNRFHCHFSPRDWQRLINNNWGFRPKRLSFKLFNIQVKEVTQNEGTKTIANNLTSTIQVFTDSEYQLPYVLGSAHQGCLPPFPADVFMIPQYGYLTLNNGSQAVGRSSFYCLEYFPSQMLRTGNNFSFSYTFEDVPFHSSYAHSQSLDRLMNPLIDQYLYYLSRTQSTGGTAGTQQLLFSQAGPSNMSAQARNWLPGPCYRQQRVSTTLSQNNNSNFAWTGATKYHLNGRDSLVNPGVAMATNKDDEDRFFPSSGILMFGKQGAGKDNVDYSNVMLTSEEEIKTTNPVATEQYGVVADNLQQQNTAPIVGAVNSQGALPGMVWQNRDVYLQGPIWAKIPHTDGNFHPSPLMGGFGLKHPPPQILIKNTPVPADPPTAFNQAKLNSFITQYSTGQVSVEIEWELQKENSKRWNPEIQYTSNYYKSTNVDFAVNTEGVYSEPRPIGTRYLTRNL

SEQ ID NO: 500 - protein, 738 aa, synthetic construct
  REGION 1..738: note = source = /note="Description of Artificial Sequence: Synthetic polypeptide"
MAADGYLPDWLEDNLSEGIREWWDLKPGAPKPKANQQKQDDGRGLVLPGYKYLGPFNGLDKGEPVNAADAAALEHDKAYDQQLKAGDNPYLRYNHADAEFQERLQEDTSFGGNLGRAVFQAKKRVLEPLGLVEEGAKTAPGKKRPVEPSPQRSPDSSTGIGKKGQQPARKRLNFGQTGDSESVPDPQPIGEPPAAPSSVGSGTMAAGGGAPMADNNEGADGVGSSSGNWHCDSTWLGDRVITTSTRTWALPTYNNHLYKQISNGTSGGSTNDNTYFGYSTPWGYFDFNRFHCHFSPRDWQRLINNNWGFRPKRLSFKLFNIQVKEVTQNEGTKTIANNLTSTIQVFTDSEYQLPYVLGSAHQGCLPPFPADVFMIPQYGYLTLNNGSQAVGRSSFYCLEYFPSQMLRTGNNFSFSYTFEDVPFHSSYAHSQSLDRLMNPLIDQYLYYLSRTQSTGGTAGTQQLLFSQAGPSNMSAQARNWLPGPCYRQQRVSTTLSQNNNSNFAWTGATKYHLNGRDSLVNPGVAMATNKDDEDRFFPSSGILMFGKQGAGKDNVDYSNVMLTSEEEIKTTNPVATEQYGVVADNLQQQNTAPIVGAVNSQGALPGMVWQNRDVYLQGPIWAKIPHTDGNFHPSPLMGGFGLKHPPPQILIKNTPVPADPPTAFNQAKLNSFITQYSTGQVSVEIVWELQKENSKRWNPEIQYTSNYYKSTNVDFAVNTEGVYSEPRPIGTRYLTRNL

SEQ ID NO: 501 - protein, 738 aa, synthetic construct; identical to SEQ ID NO: 499
  REGION 1..738: note = source = /note="Description of Artificial Sequence: Synthetic polypeptide"

SEQ ID NO: 502 - DNA, 2214 bp, synthetic construct
  misc_feature 1..2214: note = source = /note="Description of Artificial Sequence: Synthetic polynucleotide"
  source 1..2214: mol_type = other DNA
atggctgctgacggttatcttccagattggctcgaggacaacctctctgagggcattcgcgagtggtgggacctgaaacctggagcccccaagcccaaggccaaccagcagaagcaggacgacggccggggtctggtgcttcctggctacaagtacctcggacccttcaacggactcgacaagggggagcccgtcaacgcggcggacgcagcggccctcgagcacgacaaggcctacgaccagcagctcaaagcgggtgacaatccgtacctgcggtataaccacgccgacgccgagtttcaggagcgtctgcaagaagatacgtcttttgggggcaacctcgggcgagcagtcttccaggccaagaagcgggttctcgaacctctcggtctggttgaggaagctgctaagacggctcctggaaagaagagaccggtagaaccgtcacctcagcgttcccccgactcctccacgggcatcggcaagaaaggccagcagcccgctagaaagagactgaactttgggcagactggcgactcagagtcagtccccgaccctcaaccaatcggagaaccaccagcaggcccctctggtctgggatctggtacaatggctgcaggcggtggcgctccaatggcagacaataacgaaggcgccgacggagtgggtaatgcctcaggaaattggcattgcgattccacatggctgggcgacagagtcatcaccaccagcacccgaacctgggctttgcccacctacaacaaccacctctacaagcaaatctccagtcagtcagcaggtagcaccaacgacaacgtctacttcggctacagcaccccctgggggtattttgacttcaacagattccactgtcacttctcaccacgtgactggcagcggctcatcaacaacaactggggattccggcccaagaagctcaacttcaagctgttcaacatccaggtcaaggaggtcacaacgaatgacggcgtcacgaccatcgccaataaccttaccagcacggttcaggtcttttcggactcggaataccagctgccctacgtcctcggctccgcacaccagggctgcctgcctccgttcccggcggacgtcttcatgattccccagtacggctacctgactctgaacaatggcagccaatcggtgggtcgttcctctttctactgcctggaatatttcccttctcaaatgctgagaacgggcaacaacttcaccttcagctacaccttcgaggacgttcccttccacagcagctacgcacacagccagagcctggaccggctgatgaatcctcttatcgaccagtacctgtattacctggccagaacacagagcaacgcaggaggcacagctggcaatcgggaactgcagttttatcagggcgggcctaccaccatggccgaacaagccaaaaactggctgcctagaccttgcttccggcaacaaagagtctccaagacgctggatcaaaacaacaacagcaactttgcttggactggtgccaccaaataccatctaaatggaagaaattcattggttaatcccggtgtcgccatggcaacccacaaggacgacgaggaacgcttcttcccttcgagcggagtcctgatttttggaaaaactggagcagctaataagactacactggaaaatgtgttaatgacaaatgaagaggaaattcgtcctaccaacccggtagccaccgaggaatacgggactgttagcagcaacctgcaggcggctaacactgcagcccagacacaagttgtcaacaaccagggagccttacctggtatggtctggcagaaccgggacgtgtacctgcagggtcccatctgggccaagattcctcacacggacggcaactttcacccgtctccgctgatgggcggctttggactgaagcatccgcctcctcagatcctgatcaaaaacactcctgttcctgctaatcccccggaggtgtttacgcctgccaagtttgcttctttcatcacacagtacagcaccggccaggtcagcgtggagatcgagtgggagctgcagaaggagaacagcaagcgctggaacccagagattcagtatacctccaattttgacaaacagactggtgtggactttgccgttgacagccagggtgtttattctgagcctcgccccattggtactcgttacctcacccgtaatctgtaa

SEQ ID NO: 503 - protein, 737 aa, synthetic construct
  REGION 1..737: note = source = /note="Description of Artificial Sequence: Synthetic polypeptide"
MAADGYLPDWLEDNLSEGIREWWDLKPGAPKPKANQQKQDDGRGLVLPGYKYLGPFNGLDKGEPVNAADAAALEHDKAYDQQLKAGDNPYLRYNHADAEFQERLQEDTSFGGNLGRAVFQAKKRVLEPLGLVEEAAKTAPGKKRPVEPSPQRSPDSSTGIGKKGQQPARKRLNFGQTGDSESVPDPQPIGEPPAGPSGLGSGTMAAGGGAPMADNNEGADGVGNASGNWHCDSTWLGDRVITTSTRTWALPTYNNHLYKQISSQSAGSTNDNVYFGYSTPWGYFDFNRFHCHFSPRDWQRLINNNWGFRPKKLNFKLFNIQVKEVTTNDGVTTIANNLTSTVQVFSDSEYQLPYVLGSAHQGCLPPFPADVFMIPQYGYLTLNNGSQSVGRSSFYCLEYFPSQMLRTGNNFTFSYTFEDVPFHSSYAHSQSLDRLMNPLIDQYLYYLARTQSNAGGTAGNRELQFYQGGPTTMAEQAKNWLPRPCFRQQRVSKTLDQNNNSNFAWTGATKYHLNGRNSLVNPGVAMATHKDDEERFFPSSGVLIFGKTGAANKTTLENVLMTNEEEIRPTNPVATEEYGTVSSNLQAANTAAQTQVVNNQGALPGMVWQNRDVYLQGPIWAKIPHTDGNFHPSPLMGGFGLKHPPPQILIKNTPVPANPPEVFTPAKFASFITQYSTGQVSVEIEWELQKENSKRWNPEIQYTSNFDKQTGVDFAVDSQGVYSEPRPIGTRYLTRNL

SEQ ID NO: 504 - DNA, 2214 bp, synthetic construct
  misc_feature 1..2214: note = source = /note="Description of Artificial Sequence: Synthetic polynucleotide"
  source 1..2214: mol_type = other DNA
atggctgctgacggttatcttccagattggctcgaggacaacctctctgagggcattcgcgagtggtgggacctgaaacctggagcccccaagcccaaggccaaccagcagaagcaggacgacggccggggtctggtgcttcctggctacaagtacctcggacccttcaacggactcgacaagggggagcccgtcaacgcggcggacgcagcggccctcgagcacgacaaggcctacgaccagcagctcaaagcgggtgacaatccgtacctgcggtataaccatgccgacgccgagtttcaggagcgtctgcaagaagatacgtcttttgggggcaacctcgggcgagcagtcctccaggccaagaagcgggttctcgaacctctcggtctggttgaggaagctgctaagacggctcctggaaagaagagaccggtagaaccgtcacctcagcgttcccccgactcctccacgggcatcggcaagaaaggccagcagcccgctagaaagagactgaactttgggcagactggcgactcagagtcagtccccgaccctcaaccaatcggagaaccaccagcaggcccctctggtctgggatctggtacaatggctgcaggcggtggcgctccaatggcagacaataacgaaggcgccgacggagtgggtaatgcctcaggaaattggcattgcgattccacatggctgggcgacagagtcatcaccaccagcacccgaacctgggctttgcccacctacaacaaccacctctacaagcaaatctccagtcagtcagcaggtagcaccaacgacaacgtctacttcggctacagcaccccctgggggtattttgacttcaacagattccactgtcacttctcaccacgtgactggcagcggctcatcaacaacaactggggattccggcccaagaagctcaacttcaagctgttcaacatccaggtcaaggaggtcacaacgaatgacggcgtcacgaccatcgccaataaccttaccagcacggttcaggtcttttcggactcggaataccagctgccctacgtcctcggctccgcacaccagggctgcctgcctccgttcccggcggacgtcttcatgattccccagtacggctacctgactctgaacaatggcagccaatcggtgggtcgttcctctttctactgcctggaatatttcccttctcaaatgctgagaacgggcaacaacttcaccttcagctacaccttcgaggacgttcccttccacagcagctacgcacacagccagagcctggaccggctgatgaatcctcttatcgaccagtacctgtattacctggccagaacacagagcaacgcaggaggcacagctggcaatcgggaactgcagttttatcagggcgggcctaccaccatggccgaacaagccaaaaactggctgcctggaccttgcttccggcaacaaagagtctccaagacgctggatcaaaacaacaacagcaactttgcttggactggtgccaccaaataccatctaaatggaagaaattcattggttaatcccggtgtcgccatggcaacccacaaggacgacgaggaacgcttcttcccttcgagcggagtcctgatttttggaaaaactggagcagctaataagactacactggaaaatgtgttaatgacaaatgaagaggaaattcgtcctaccaacccggtagccaccgaggaatacgggactgttagcagcaacctgcaggcggctaacactgcagcccagacacaagttgtcaacaaccagggagccttacctggtatggtctggcagaaccgggacgtgtacctgcagggtcccatctgggccaagattcctcacacggacggcaactttcacccgtctccgctgatgggcggctttggactgaagcatccgcctcctcagatcctgatcaaaaacactcctgttcctgctaatcccccggaggtgtttacgcctgccaagtttgcttctttcatcacacagtacagcaccggccaggtcagcgtggagatcgagtgggagctgcagaaggagaacagcaagcgctggaacccagagattcagtatacctccaattttgacaaacagactggtgtggactttgccgttgacagccagggtgtttattctgagcctcgccccattggtactcgttacctcacccgtaatctgtaa

SEQ ID NO: 505 - protein, 737 aa, synthetic construct; identical to SEQ ID NO: 464
  REGION 1..737: note = source = /note="Description of Artificial Sequence: Synthetic polypeptide"

SEQ ID NO: 506 - protein, 737 aa, synthetic construct
  REGION 1..737: note = source = /note="Description of Artificial Sequence: Synthetic polypeptide"
MAADGYLPDWLEDNLSEGIREWWDLKPGAPKPKANQQKQDDGRGLVLPGYKYLGPFNGLDKGEPVNAADAAALEHDKAYDQQLKAGDNPYLRYNHADAEFQERLQEDTSFGGNLGRAVLQAKKRVLEPLGLVEEAAKTAPGKKRPVEPSPQRSPDSSTGIGKKGQQPARKRLNFGQTGDSESVPDPQPIGEPPAGPSGLGSGTMAAGGGAPMADNNEGADGVGNASGNWHCDSTWLGDRVITTSTRTWALPTYNNHLYKQISSQSAGSTNDNVYFGYSTPWGYFDFNRFHCHFSPRDWQRLINNNWGFRPKKLNFKLFNIQVKEVTTNDGVTTIANNLTSTVQVFSDSEYQLPYVLGSAHQGCLPPFPADVFMIPQYGYLTLNNGSQSVGRSSFYCLEYFPSQMLRTGNNFTFSYTFEDVPFHSSYAHSQSLDRLMNPLIDQYLYYLARTQSNAGGTAGNRELQFYQGGPTTMAEQAKNWLPGPCFRQQRVSKTLDQNNNSNFAWTGATKYHLNGRNSLVNPGVAMATHKDDEERFFPSSGVLIFGKTGAANKTTLENVLMTNEEEIRPTNPVATEEYGTVSSNLQAANTAAQTQVVNNQGALPGMVWQNRDVYLQGPIWAKIPHTDGNFHPSPLMGGFGLKHPPPQILIKNTPVPANPPEVFTPAKFASFITQYSTGQVSVEIEWELQKENSKRWNPEIQYTSNFDKQTGVDFAVDSQGVYSEPRPIGTRYLTRNL

SEQ ID NO: 507 - DNA, 2217 bp, synthetic construct
  misc_feature 1..2217: note = source = /note="Description of Artificial Sequence: Synthetic polynucleotide"
  source 1..2217: mol_type = other DNA
atggctgccgatggttatcttccagattggctcgaggacaacctctctgagggcattcgcgagtggtgggacctgaaacctggagccccgaaacccaaagccaaccagcaaaagcaggacgacggccggggtctggtgcttcctggctacaagtacctcggacccttcaacggactcgacaagggggagcccgtcaacgcggcggacgcagcggccctcgagcacgacaaggcctacgaccagcagctcaaagcgggtgacaatccgtacctgcggtataatcacgccgacgccgagtttcaggagcgtctgcaagaagatacgtcttttgggggcaacctcgggcgagcagtcttccaggccaagaagcgggttctcgaacctctcggtctggttgaggaaggcgctaagacggctcctggaaagaagagaccggtagagccgtcaccacagcgttcccccgactcctccacgggcatcggcaagaaaggccagcagcccgccagaaagagactcaatttcggtcagactggcgactcagagtcagtccccgaccctcaacctatcggagaacctccagcagcgccctctagtgtgggatctggtacaatggctgcaggcggtggcgcaccaatggcagacaataacgaaggtgccgacggagtgggtagttcctcgggaaattggcattgcgattccacatggctgggcgacagagtcatcaccaccagcacccgaacctgggccctgcccacctacaacaaccacctctacaagcaaatctccaacgggacctcgggaggcagcaccaacgacaacacctactttggctacagcaccccctgggggtattttgactttaacagattccactgccacttctcaccacgtgactggcagcgactcatcaacaacaactggggattccggcccaagagactcagcttcaagctcttcaacatccaggtcaaagaggtcacgcagaatgaaggcaccaagaccatcgccaataacctcaccagcaccatccaggtgtttacggactcggaataccagctgccgtacgtcctcggctctgcccaccagggctgcctgcctccgttcccggcggacgtcttcatgattcctcagtacggctacctgactctcaacaacggtagtcaggccgtgggacgttcctccttctactgcctggagtacttcccctctcagatgctgagaacgggcaacaacttttccttcagctacactttcgaggacgtgcctttccacagcagctacgcgcacagccagagtttggacaggctgatgaatcctctcatcgaccagtacctgtactacctgtcaagaacccagtctacgggaggcacagcgggaacccagcagttgctgttttctcaggccgggcctagcaacatgtcggctcaggccagaaactggctgcctggaccctgctacagacagcagcgcgtctccacgacactgtcgcaaaacaacaacagcaactttgcctggactggtgccaccaagtatcatctgaacggcagagactctctggtgaatccgggcgtcgccatggcaaccaacaaggacgacgaggaccgcttcttcccacccagcggcatcctcatgtttggcaagcagggagctggaaaagacaacgtggactatagcaacgtgatgctaaccagcgaggaagaaatcaagaccaccaaccccgtggccacagaacagtatggcgtggtggctgataacctacagcagcaaaacaccgctcctattgtgggggccgtcaacagccagggagccttacctggcatggtctggcagaaccgggacgtgtacctgcagggtcctatttgggccaagattcctcacacagatggcaactttcacccgtctcctttaatgggcggctttggacttaaacatccgcctcctcagatcctcatcaaaaacactcctgttcctgcggatcctccaacagcgttcaaccaggccaagctgaattctttcatcacgcagtacagcaccggacaagtcagcgtggtgatcgagtgggagctgcagaaggagaacagcaagcgctggaacccagagattcagtatacttccaactactacaaatctacaaatgtggactttgctgttaatactgagggtgtttactctgagcttcgccccattggcactcgttacctcacccgtaatctgtaa

SEQ ID NO: 508 - protein, 738 aa, synthetic construct
  REGION 1..738: note = source = /note="Description of Artificial Sequence: Synthetic polypeptide"
MAADGYLPDWLEDNLSEGIREWWDLKPGAPKPKANQQKQDDGRGLVLPGYKYLGPFNGLDKGEPVNAADAAALEHDKAYDQQLKAGDNPYLRYNHADAEFQERLQEDTSFGGNLGRAVFQAKKRVLEPLGLVEEGAKTAPGKKRPVEPSPQRSPDSSTGIGKKGQQPARKRLNFGQTGDSESVPDPQPIGEPPAAPSSVGSGTMAAGGGAPMADNNEGADGVGSSSGNWHCDSTWLGDRVITTSTRTWALPTYNNHLYKQISNGTSGGSTNDNTYFGYSTPWGYFDFNRFHCHFSPRDWQRLINNNWGFRPKRLSFKLFNIQVKEVTQNEGTKTIANNLTSTIQVFTDSEYQLPYVLGSAHQGCLPPFPADVFMIPQYGYLTLNNGSQAVGRSSFYCLEYFPSQMLRTGNNFSFSYTFEDVPFHSSYAHSQSLDRLMNPLIDQYLYYLSRTQSTGGTAGTQQLLFSQAGPSNMSAQARNWLPGPCYRQQRVSTTLSQNNNSNFAWTGATKYHLNGRDSLVNPGVAMATNKDDEDRFFPPSGILMFGKQGAGKDNVDYSNVMLTSEEEIKTTNPVATEQYGVVADNLQQQNTAPIVGAVNSQGALPGMVWQNRDVYLQGPIWAKIPHTDGNFHPSPLMGGFGLKHPPPQILIKNTPVPADPPTAFNQAKLNSFITQYSTGQVSVVIEWELQKENSKRWNPEIQYTSNYYKSTNVDFAVNTEGVYSELRPIGTRYLTRNL

SEQ ID NO: 509 - DNA, 2214 bp, synthetic construct
  misc_feature 1..2214: note = source = /note="Description of Artificial Sequence: Synthetic polynucleotide"
  source 1..2214: mol_type = other DNA
atggctgctgacggttatcttccagattggctcgaggacaacctctctgagggcattcgcgagtggtgggacctgaaacctggagcccccaagcccaaggccaaccagcagaagcaggacgacggccggggtctggtgcttcctggctacaagtacctcggacccttcaacggactcgacaagggggagcccgtcaacgcggcggacgcagcggccctcgagcacgacaaggcctacgaccagcagctcaaagcgggtgacaatccgtacctgcggtataaccacgccgacgccgagtttcaggagcgtctgcaagaagatacgtcttttgggggcaacctcgggcgagcagtcttccaggccaagaagcgggttctcgaacctctcggtctggttgaggaagctgctaagacggctcctggaaagaagagaccggtagaaccgtcacctcagcgttcccccgactcctccacgggcatcggcaagaaaggccagcagcccgctagaaagagactgaactttgggcagactggcgactcagagtcagtccccgaccctcaaccaatcggagaaccaccagcaggcccctctggtctgggatctggtacaatggctgcaggcggtggcgccccaatggcagacaataacgaaggcgccgacggagtgggtaatgcctcaggaaattggcattgcgattccacatggctgggcgacagagtcatcaccaccagcacccgaacctgggctttgcccacctacaacaaccacctctacaagcaaatctccagtcagtcagcaggtagcaccaacgacaacgtctacttcggctacagcaccccctgggggtattttgacttcaacagattccactgtcacttctcaccacgtgactggcagcggctcatcaacaacaactggggattccggcccaagaagctcaacttcaagctgttcaacatccaggtcaaggaggtcacaacgaatgacggcgtcacgaccatcgccaataaccttaccagcacggttcaggtcttttcggactcggaataccagctgccctacgtcctcggctccgcacaccagggctgcctgcctccgttcccggcggacgtcttcatgattccccagtacggctacctgactctgaacaatggcagccaatcggtgggtcgttcctctttctactgcctggaatatttcccttctcaaatgctgagaacgggcaacaacttcaccatcagctacaccttcgaggacgttcccttccacagcagctacgcacacagccagagcctggaccggctgatgaatcctcttatcgaccagtacctgtattacctggccagaacacagagcaacgcaggaggcacagctggcaatcaggaactgcagttttatcagggcgggcctaccaccatggccgaacaagccaaaaactggctgcctggaccttgcttccggcaacaaagagtctccaagacgctggatcaaaacaacaacagcaactttgcttggactggtgccaccaaataccatctaaatggaagaaattcattggttaatcccggtgtcgccatggcaacccacaaggacgacgaggaacgcttcttcccttcgagcggagtcctgatttttggaaaaactggagcagctaataagactacactggaaaatgtgttaatgacaaatgaagaggaaattcgtcctaccaacccggtagccaccgaggaatacgggactgttagcagcaacctgcaggcggctaacactgcagcccagacacaagttgtcaacaaccagggagccttacctggtatggtctggcagaaccgggacgtgtacctgcagggtcccatctgggccaagattcctcacacagatggcaactttcacccgtctcctttaatgggcggctttggacttaaacatccgcctcctcagatcctcatcaaaaacactcctgttcctgcggatcctccaacagcgttcaaccaggccaagctgaattctttcatcacgcagtacagcaccggacaagtcagcgtggagatcgagtgggagctgcagaaggagaacagcaagcgctggaacccagagattcagtatacttccaactactacaaatctacaaatgtggactttgctgttaatactgagggtgtttactctgagcctcgccccattggcactcgttacctcacccgtaatctgtaa

SEQ ID NO: 510 - protein, 737 aa, synthetic construct
  REGION 1..737: note = source = /note="Description of Artificial Sequence: Synthetic polypeptide"
MAADGYLPDWLEDNLSEGIREWWDLKPGAPKPKANQQKQDDGRGLVLPGYKYLGPFNGLDKGEPVNAADAAALEHDKAYDQQLKAGDNPYLRYNHADAEFQERLQEDTSFGGNLGRAVFQAKKRVLEPLGLVEEAAKTAPGKKRPVEPSPQRSPDSSTGIGKKGQQPARKRLNFGQTGDSESVPDPQPIGEPPAGPSGLGSGTMAAGGGAPMADNNEGADGVGNASGNWHCDSTWLGDRVITTSTRTWALPTYNNHLYKQISSQSAGSTNDNVYFGYSTPWGYFDFNRFHCHFSPRDWQRLINNNWGFRPKKLNFKLFNIQVKEVTTNDGVTTIANNLTSTVQVFSDSEYQLPYVLGSAHQGCLPPFPADVFMIPQYGYLTLNNGSQSVGRSSFYCLEYFPSQMLRTGNNFTISYTFEDVPFHSSYAHSQSLDRLMNPLIDQYLYYLARTQSNAGGTAGNQELQFYQGGPTTMAEQAKNWLPGPCFRQQRVSKTLDQNNNSNFAWTGATKYHLNGRNSLVNPGVAMATHKDDEERFFPSSGVLIFGKTGAANKTTLENVLMTNEEEIRPTNPVATEEYGTVSSNLQAANTAAQTQVVNNQGALPGMVWQNRDVYLQGPIWAKIPHTDGNFHPSPLMGGFGLKHPPPQILIKNTPVPADPPTAFNQAKLNSFITQYSTGQVSVEIEWELQKENSKRWNPEIQYTSNYYKSTNVDFAVNTEGVYSEPRPIGTRYLTRNL

SEQ ID NO: 511 - DNA, 2217 bp, synthetic construct
  misc_feature 1..2217: note = source = /note="Description of Artificial Sequence: Synthetic polynucleotide"
  source 1..2217: mol_type = other DNA
atggctgccgatggttatcttccagattggctcgaggacaacctctctgagggcattcgcgagtggtgggacctgaaacctggagccccgaaacccaaagccaaccagcaaaagcaggacgacggccggggtctggtgcttcctggctacaagtacctcggacccttcaacggactcgacaagggggagcccgtcaacgcggcggacgcagcggccctcgagcacgacaaggcctacgaccagcagctcaaagcgggtgacaatccgtacctgcggtataatcacgccgacgccgagtttcaggagcgtctgcaagaagatacgtcttttgggggcaacctcgggcgagcagtcttccaggccaagaagcgggttctcgaacctctcggtctggttgaggaaggcgctaagacggctcctggaaagaagagaccggtagagccgtcaccacagcgttcccccgactcctccacgggcatcggcaagaaaggccagcagcccgccagaaagagactcaatttcggtcagactggcgactcagagtcagtccccgaccctcaacctatcggagaacctccagcagcgccctctagtgtgggatctggtacaatggctgcaggcggtggcgcaccaatggcagacaataacgaaggtgccgacggagtgggtagttcctcgggaaattggcattgcgattccacatggctgggcgacagagtcatcaccaccagcacccgaacctgggccctgcccgcctacaacaaccacctctacaagcaaatctccaacgggacctcgggaggcagcaccaacgacaacacctactttggctacagcaccccctgggggtattttgactttaacagattccactgccacttctcaccacgtgactggcagcgactcatcaacaacaactggggattccggcccaagagactcagcttcaagctcttcaacatccaggtcaaagaggtcacgcagaatgaaggcaccaagaccatcgccaataacctcaccagcaccatccaggtgtttacggactcggaataccagctgccgtacgtcctcggctctgcccaccagggctgcctgcctccgttcccggcggatgtcttcatgattcctcagtacggctacctgactctcaacaacggtagtcaggccgtgggacgttcctccttctactgcctggagtacttcccctctcagatgctgagaacgggcaacaacttttccttcagctacactttcgaggacgtgcctttccacagcagctacgcgcacagccagagtttggacaggctgatgaatcctctcatcgaccagtacctgtactacctgtcaagaacccagtctacgggaggcacagcgggaacccagcagttgctgttttctcaggccgggcctagcaacatgtcggctcaggccagaaactggctgcctggaccctgctacagacagcagcgcgtctccacgacactgtcgcaaaacaacaacagcaactttgcctggactggtgccaccaagtatcatctgagcggcagagactctctggtgaatccgggcgtcgccatggcaaccaacaaggacgacgaggaccgcttcttcccatccagcggcatcctcatgtttggcaagcagggagctggaaaagacaacgtggactatagcaacgtgatgctaaccagcgaggaagaaatcaagaccaccaaccccgtggccacagaacagtatggcgtggtggctgataacctacagcagcaaaacaccgctcctattgtgggggccgtcaacagccagggagccttacctggcatggtctggcagaaccgggacgtgtacctgcagggtcctatttgggccaagattcctcacacagatggcaactttcacccgtctcctttaatgggcggctttggacttaaacatccgcctcctcagatcctcatcaaaaacactcctgttcctgcggatcctccaacagcgttcaaccaggccaagctgaattcttccatcacgcagtacagcaccggacaagtcagcgtggagatcgagtgggagctgcagaaggagaacagcaagcgctggaacccagagattcagtatacttccaactactacaaatctacaaatgtggactttgctgttaatactgagggtgtttactctgagcctcgccccattggcactcgttacctcacccgtaatttgtaa

SEQ ID NO: 512 - protein, 738 aa, synthetic construct
  REGION 1..738: note = source = /note="Description of Artificial Sequence: Synthetic polypeptide"
MAADGYLPDWLEDNLSEGIREWWDLKPGAPKPKANQQKQDDGRGLVLPGYKYLGPFNGLDKGEPVNAADAAALEHDKAYDQQLKAGDNPYLRYNHADAEFQERLQEDTSFGGNLGRAVFQAKKRVLEPLGLVEEGAKTAPGKKRPVEPSPQRSPDSSTGIGKKGQQPARKRLNFGQTGDSESVPDPQPIGEPPAAPSSVGSGTMAAGGGAPMADNNEGADGVGSSSGNWHCDSTWLGDRVITTSTRTWALPAYNNHLYKQISNGTSGGSTNDNTYFGYSTPWGYFDFNRFHCHFSPRDWQRLINNNWGFRPKRLSFKLFNIQVKEVTQNEGTKTIANNLTSTIQVFTDSEYQLPYVLGSAHQGCLPPFPADVFMIPQYGYLTLNNGSQAVGRSSFYCLEYFPSQMLRTGNNFSFSYTFEDVPFHSSYAHSQSLDRLMNPLIDQYLYYLSRTQSTGGTAGTQQLLFSQAGPSNMSAQARNWLPGPCYRQQRVSTTLSQNNNSNFAWTGATKYHLSGRDSLVNPGVAMATNKDDEDRFFPSSGILMFGKQGAGKDNVDYSNVMLTSEEEIKTTNPVATEQYGVVADNLQQQNTAPIVGAVNSQGALPGMVWQNRDVYLQGPIWAKIPHTDGNFHPSPLMGGFGLKHPPPQILIKNTPVPADPPTAFNQAKLNSSITQYSTGQVSVEIEWELQKENSKRWNPEIQYTSNYYKSTNVDFAVNTEGVYSEPRPIGTRYLTRNL

SEQ ID NO: 513 - protein, 736 aa, synthetic construct; identical to SEQ ID NO: 13
  REGION 1..736: note = source = /note="Description of Artificial Sequence: Synthetic polypeptide"

SEQ ID NO: 514 - DNA, 2217 bp, synthetic construct
  misc_feature 1..2217: note = source = /note="Description of Artificial Sequence: Synthetic polynucleotide"
  source 1..2217: mol_type = other DNA
atggctgctgacggttatcttccagattggctcgaggacaacctctctgagggcattcgcgagtggtgggacctgaaacctggagcccccaagcccaaggccaaccagcagaagcaggacgacggccggggtctggtgcttcctggctacaagtacctcggacccttcaacggactcgacaagggggagcccgtcaacgcggcggacgcagcggccctcgagcacgacaaggcctacgaccagcagctcaaagcgggtgacaatccgtacctgcggtataaccacgccgacgccgagtttcaggagcgtctgcaagaagatacgtcttttgggggcaacctcgggcgagcagtcttccaggccaagaagcgggttctcgaacctctcggtctggttgaggaagctgctaagacggctcctggaaagaagagaccggtagaaccgtcacctcagcgttcccccgactcctccacgggcatcggcaagaaaggccagcagcccgctaaaaagagactgaactttggtcagactggcgactcagagtcagtccccgaccctcaaccaatcggagaaccaccagcaggcccctctggtctgggatctggtacaatggctgcaggcggtggcgctccaatggcagacaataacgaaggcgccgacggagtgggtagttcctcaggaaattggcattgcgattccacatggctgggcgacagagtcatcaccaccagcacccgaacctgggccctgcccacctacaacaaccacctctacaagcaaatatccaatgggacatcgggaggaagcaccaacgacaacacctacttcggctacagcaccccctgggggtattttgacttcaacagattccactgccacttctcaccacgtgactggcagcgactcatcaacaacaactggggattccggccaaaaagactcagcttcaagctcttcaacatccaggtcaaggaggtcacgcagaatgaaggcaccaagaccatcgccaataaccttaccagcacgattcaggtatttacggactcggaataccagctgccgtacgtcctcggctccgcgcaccagggctgcctgcctccgttcccggcggacgtcttcatgattccccagtacggctaccttacactgaacaatggaagtcaagccgtaggccgttcctccttctactgcctggaatattttccatctcaaatgctgcgaactggaaacaattttgaattcagctacaccttcgaggacgtgcctttccacagcagctacgcacacagccagagcttggaccgactgatgaatcctctcatcgaccagtacctgtactacttatccagaactcagtccacaggaggaactcaaggtacccagcaattgttattttctcaagctgggcctgcaaacatgtcggctcaggctaagaactggctacctggaccttgctaccggcagcagcgagtctctacgacactgtcgcaaaacaacaacagcaactttgcttggactggtgccaccaaatatcacctgaacggaagagactctttggtaaatcccggtgtcgccatggcaacccacaaggacgacgaggaacgcttcttcccgtcgagtggagtcctgatgtttggaaaacagggtgctggaagagacaatgtggactacagcagcgttatgctaaccagcgaagaagaaattaaaaccactaaccctgtagccacagaacaatacggtgtggtggctgacaacttgcagcaaaccaatacagggcctattgtgggaaatgtcaacagccaaggagccttacctggcatggtctggcagaaccgagacgtgtacctgcagggtcccatctgggccaagattcctcacacggacggcaacttccacccttcaccgctaatgggaggatttggactgaagcacccacctcctcagatcctgatcaagaacacgccggtacctgcggatcctccaacaacgttcagccaggcgaaattggcttccttcattacgcagtacagcaccggacaggtcagcgtggaaatcgagtgggagctgcagaaggagaacagcaaacgctggaacccagagattcagtacacttcaaactactacaaatctacaaatgtggactttgctgtcaatacagagggaacttattctgagcctcgccccattggtactcgttacctcacccgtaatctgtaa

SEQ ID NO: 515 - protein, 738 aa, synthetic construct
  REGION 1..738: note = source = /note="Description of Artificial Sequence: Synthetic polypeptide"
MAADGYLPDWLEDNLSEGIREWWDLKPGAPKPKANQQKQDDGRGLVLPGYKYLGPFNGLDKGEPVNAADAAALEHDKAYDQQLKAGDNPYLRYNHADAEFQERLQEDTSFGGNLGRAVFQAKKRVLEPLGLVEEGAKTAPGKKRPVEPSPQRSPDSSTGIGKKGQQPARKRLNFGQTGDSESVPDPQPLGEPPAAPSSVGSGTMAAGGGAPMADNNEGADGVGSSSGNWHCDSTWLGDRVITTSTRTWALPTYNNHLYKQISNGTSGGSTNDNTYFGYSTPWGYFDFNRFHCHFSPRDWQRLINNNWGFRPKRLSFKLFNIQVKEVTQNEGTKTIANNLTSTIQVFTDSEYQLPYVLGSAHQGCLPPFPADVFMIPQYGYLTLNNGSQAVGRSSFYCLEYFPSQMLRTGNNFSFSYTFEDVPFHSSYAHSQSLDRLMNPLIDQYLYYLSRTQSTGGTAGTQQLLFSQAGPSNMSAQARNWLPGPCYRQQRVSTTLSQNNNSNFAWTGATKYHLNGRDSLVNPGVAMATNKDDEDRFFPSSGILMFGKQGAGKDNVDYSNVMLTSEEEIKTTNPVATEQYGVVADNLQRQNTAPIVGAVNSQGALPGMVWQNRDVYLQGPIWAKIPHTDGNFHPSPLMGGFGLKHPPPQILIKNTPVPADPPTAFNQAKLNSFITQYSTGQVSVEIEWELQKENSKRWNPEIQYTSNYYKSTNVDFAVNTEGVYSEPRPIGTRYLTRNL

SEQ ID NO: 516 - protein, 736 aa, synthetic construct
  REGION 1..736: note = source = /note="Description of Artificial Sequence: Synthetic polypeptide"
MAADGYLPDWLEDNLSEGIREWLNLKPGAPQPKANQQKQDNARGLVLPGYKYLGPFNGLDKGDPVNEADAAALEHDKAYGQQLKAGDNPYLKYNHADAEFQERLQKDTSFGGNLGKAVFQAKKRILEPLGLVETPAKTAPGKKRPVDPSPQRSPDSSSGIGKKSPHPARKRLNFGQTGEAESVPDPQPIGEPPSDPSSVGSGTMAAGGGAPMADNNEGADGVGNSSGNWHCDSTWLGDRVITTSTRTWALPTYNNHLYKQISSQSGATNDNHYFGYSTPWGYFDFNRFHCHFSPRDWQRLINNNWGFRPKRLSFKLFNIQVKEVTQNDGTTTIANNLTSTVQVFTDSEYQLPYVLGSAHQGCLPPFPADVFMIPQYGYLTLNNGSQAVGRSSFYCLEYFPSQMLRTGNNFQFSYTFEDVPFHSSYAHSQSLDRLMNPLIDQYLYYLSKTQGTNATVQGAKLQFSQAGPSNMRDQARNWLPGPCYRQQRVSKTANDNNNSEYAWTGATKYHLNGRDSLVNPGPAMASHKDDEEKFFPMNGTLVFGKNGAGNSNVDIENVMITDEEEIRTTNPVATEQYGVVSDNLQSSNTRPITGDVDSQGVLPGMVWQDRDVYLQGPIWAKIPHTDGHFHPSPLMGGFGLKHPPPQILIKNTPVPANPATTFTPGKFASFITQYSTGQVSVQIEWELQKENSKRWNPEIQYTSNYNKSVNVDFTVDTNGVYSEPRPIGTRYLTRNL

SEQ ID NO: 517 - protein, 736 aa, synthetic construct; identical to SEQ ID NO: 92
  REGION 1..736: note = source = /note="Description of Artificial Sequence: Synthetic polypeptide"

SEQ ID NO: 518 - protein, 736 aa, synthetic construct
  REGION 1..736: note = source = /note="Description of Artificial Sequence: Synthetic polypeptide"
MAADGYLPDWLEDNLSEGIREWWDLKPGAPKPKANQQKQDDGRGLVLPGYKYLGPFNGLDKGEPVNAADAAALEHDKAYDQQLKAGDNPYLRYNHADAEFQERLQEDTSFGGNLGRAVFQAKKRVLEPLGLVEEGAKTAPGKKRPVEQSPQEPDSSSGIGKTGQQPAKKRLNFGQTGDSESVPDPQPLGEPPAAPSGLGPNTMASGGGAPMADNNEGADGVGNSSGNWHCDSTWLGDRVITTSTRTWALPTYNNHLYKQISNGTSGGSTNDNTYFGYSTPWGYFDFNRFHCHFSPRDWQRLINNNWGFRPKRLNFKLFNIQVKEVTTNEGTKTIANNLTSTVQVFTDSEYQLPYVLGSAHQGCLPPFPADVFMVPQYGYLTLNNGSQALGRSSFYCLEYFPSQMLRTGNNFQFSYTFEDVPFHSSYAHSQSLDRLMNPLIDQYLYYLVRTQTTGTGGTQTLAFSQAGPSSMANQARNWVPGPCYRQQRVSTTTNQNNNSNFAWTGAAKFKLNGRDSLMNPGVAMASHKDDEDRFFPSSGVLIFGKQGAGNDGVDYSQVLITDEEEIKATNPVATEEYGAVAINNQAANTQAQTGLVHNQGVIPGMVWQNRDVYLQGPIWAKIPHTDGNFHPSPLMGGFGLKHPPPQILIKNTPVPADPPLTFNQAKLNSFITQYSTGQVSVEIEWELQKENSKRWNPEIQYTSNYYKSTNVDFAVNTEGVYSEPRPIGTRYLTRNL

SEQ ID NO: 519 - protein, 736 aa, synthetic construct; identical to SEQ ID NO: 518
  REGION 1..736: note = source = /note="Description of Artificial Sequence: Synthetic polypeptide"

SEQ ID NO: 520 - protein, 736 aa, synthetic construct
  REGION 1..736: note = source = /note="Description of Artificial Sequence: Synthetic polypeptide"
MAADGYLPDWLEDNLSEGIREWWDLKPGAPKPKANQQKQDDGRGLVLPGYKYLGPFNGLDKGEPVNAADAAALEHDKAYDQQLKAGDNPYLRYNHADAEFQERLQEDTSFGGNLGRAVFQAKKRVLEPLGLVEEGAKTAPGKKRPVEQSPQEPDSSSGIGKTGQQPAKKRLNFGQTGDSESVPDPQPLGEPPAAPSGLGPNTMASGGGAPMADNNEGADGVGNSSGNWHCDSTWLGDRVITTSTRTWALPTYNNHLYKQISNGTSGGSTNDNTYFGYSTPWGYFDFNRFHCHFSPRDWQRLINNNWGFRPKRLNFKLFNIQVKEVTTNEGTKTIANNLTSTVQVFTDSEYQLPYVLGSAHQGCLPPFPADVFMVPQYGYLTLNNGSQALGRSSFYCLEYFPSQMLRTGNNFQFSYTFEDVPFHSSYAHSQSLDRLMNPLIDQYLYYLVRTQTTGTGGTQTLAFSQAGPSSMANQARNWVPGPCYRQQRVSTTTNQNNNSNFAWTGAAKFKLNGRDSLMNPGVAMASHKDDEDRFFPSSGVLIFGKQGAGNDGVDYSQVLITDEEEIKATNPVATEEYGAVAINNQRANTQAQTGLVHNQGVIPGMVWQNRDVYLQGPIWAKIPHTDGNFHPSPLMGGFGLKHPPPQILIKNTPVPADPPLTFNQAKLNSFITQYSTGQVSVEIEWELQKENSKRWNPEIQYTSNYYKSTNVDFAVNTEGVYSEPRPIGTRYLTRNL

SEQ ID NO: 521 - protein, 736 aa, synthetic construct
  REGION 1..736: note = source = /note="Description of Artificial Sequence: Synthetic polypeptide"
MAADGYLPDWLEDNLSEGIREWWDLKPGAPKPKANQQKQDDGRGLVLPGYKYLGPFNGLDKGEPVNAADAAALEHDKAYDQQLKAGDNPYLRYNHADAEFQERLQEDTSFGGNLGRAVFQAKKRVLEPLGLVEEGAKTAPGKKRPVEQSPQEPDSSSGIGKTGQQPAKKRLNFGQTGDSESVPDPQPLGEPPAAPSGLGPNTMASGGGAPMADNNEGADGVGNSSGNWHCDSTWLGDRVITTSTRTWALPTYNNHLYKQISNGTSGGSTNDNTYFGYSTPWGYFDFNRFHCHFSPRDWQRLINNNWGFRPKRLNFKLFNIQVKEVTTNEGTKTIANNLTSTVQVFTDSEYQLPYVLGSAHQGCLPPFPADVFMVPQYGYLTLNNGSQALGRSSFYCLEYFPSQMLRTGNNFQFSYTFEDVPFHSSYAHSQSLDRLMNPLIDQYLYYLVRTQTTGTGGTQTLAFSQAGPSSMANQARNWVPGPCYRQQRVSTTTNQNNNSNFAWTGAAKFKLNGRDSLMNPGVAMASHKDDEDAFFPSSGVLIFGKQGAGNDGVDYSQVLITDEEEIKATNPVATEEYGAVAINNQAANTQAQTGLVHNQGVIPGMVWQNRDVYLQGPIWAKIPHTDGNFHPSPLMGGFGLKHPPPQILIKNTPVPADPPLTFNQAKLNSFITQYSTGQVSVEIEWELQKENSKRWNPEIQYTSNYYKSTNVDFAVNTEGVYSEPRPIGTRYLTRNL

SEQ ID NO: 522 - DNA, 1803 bp, unidentified
  source 1..1803: mol_type = unassigned DNA; note = Bovine adeno-associated virus
acggcgcctgcggcaaaaaagaggcctctagagcagagtcctcaagagccagactcctcgagcggagttggcaagaaaggcaaacagcctgccagaaagagactcaactttgacgacgaacctggagccggagacgggcctcccccagaaggaccatcttccggagctatgtctactgagactgaaatgcgtgcagcagctggcggaaatggtggcgatgcgggacaaggtgccgagggagtgggtaatgcctccggtgattggcattgcgattccacttggtcagagagccacgtcaccaccacctcaacccgcacctgggtcctgccgacctacaacaaccacctgtacctgcggctcggctcgagcaacgccagcgacaccttcaacggattctccaccccctggggatactttgactttaaccgcttccactgccacttctcgccaagagactggcaaaggctcatcaacaaccactggggactgcgccccaaaagcatgcaagtccgcatcttcaacatccaagttaaggaggtcacgacgtctaacggggagacgaccgtatccaacaacctcaccagcacggtccagatctttgcggacagcacgtacgagctcccgtacgtgatggatgcaggtcaggagggcagcttgcctcctttccccaacgacgtgttcatggtgcctcagtacgggtactgcggactggtaaccggaggcagctctcaaaaccagacagacagaaatgccttctactgtctggagtactttcccagccagatgctgagaaccggaaacaactttgagatggtgtacaagtttgaaaacgtgcccttccactccatgtacgctcacagccagagcctggataggctgatgaacccgctgctggaccagtacctgtgggagctccagtctaccacctctggaggaactctcaaccagggcaattcagccaccaactttgccaagctgaccaaaacaaacttttctggctaccgcaaaaactggctcccggggcccatgatgaagcagcagagattctccaagactgccagtcaaaactacaagattccccagggaagaaacaacagtctgctccattatgagaccagaactaccctcgacggaagatggagcaattttgccccgggaacggccatggcaaccgcagccaacgacgccaccgacttctctcaggcccagctcatctttgcggggcccaacatcaccggcaacaccaccacagatgccaataacctgatgttcacttcagaagatgaacttagggccaccaacccccgggacactgacctgtttggccacctggcaaccaaccagcaaaacgccaccaccgttcctaccgtagacgacgtggacggagtcggcgtgtacccgggaatggtgtggcaggacagagacatttactaccaagggcccatttgggccaaaattccacacacggatggacactttcacccgtctcctctcattggcggatttggactgaaaagcccgcctccacaaatattcatcaaaaacactcctgtacccgccaatcccgcaacgaccttctctccggccagaatcaacagcttcatcacccagtacagcaccggacaggtggctgtcaaaatagaatgggaaatccagaaggagcggtccaagagatggaacccagaggtccagttcacgtccaactacggagcacaggactcgcttctctgggctcccgacaacgccggagcctacaaagagcccagggccattggatcccgatacctcaccaaccacctctag

SEQ ID NO: 523 - DNA, 1617 bp, unidentified
  source 1..1617: mol_type = unassigned DNA; note = Bovine adeno-associated virus
atgcgtgcagcagctggcggaaatggtggcgatgcgggacaaggtgccgagggagtgggtaatgcctccggtgattggcattgcgattccacttggtcagagagccacgtcaccaccacctcaacccgcacctgggtcctgccgacctacaacaaccacctgtacctgcggctcggctcgagcaacgccagcgacaccttcaacggattctccaccccctggggatactttgactttaaccgcttccactgccacttctcgccaagagactggcaaaggctcatcaacaaccactggggactgcgccccaaaagcatgcaagtccgcatcttcaacatccaagttaaggaggtcacgacgtctaacggggagacgaccgtatccaacaacctcaccagcacggtccagatctttgcggacagcacgtacgagctcccgtacgtgatggatgcaggtcaggagggcagcttgcctcctttccccaacgacgtgttcatggtgcctcagtacgggtactgcggactggtaaccggaggcagctctcaaaaccagacagacagaaatgccttctactgtctggagtactttcccagccagatgctgagaaccggaaacaactttgagatggtgtacaagtttgaaaacgtgcccttccactccatgtacgctcacagccagagcctggataggctgatgaacccgctgctggaccagtacctgtgggagctccagtctaccacctctggaggaactctcaaccagggcaattcagccaccaactttgccaagctgaccaaaacaaacttttctggctaccgcaaaaactggctcccggggcccatgatgaagcagcagagattctccaagactgccagtcaaaactacaagattccccagggaagaaacaacagtctgctccattatgagaccagaactaccctcgacggaagatggagcaattttgccccgggaacggccatggcaaccgcagccaacgacgccaccgacttctctcaggcccagctcatctttgcggggcccaacatcaccggcaacaccaccacagatgccaataacctgatgttcacttcagaagatgaacttagggccaccaacccccgggacactgacctgtttggccacctggcaaccaaccagcaaaacgccaccaccgttcctaccgtagacgacgtggacggagtcggcgtgtacccgggaatggtgtggcaggacagagacatttactaccaagggcccatttgggccaaaattccacacacggatggacactttcacccgtctcctctcattggcggatttggactgaaaagcccgcctccacaaatattcatcaaaaacactcctgtacccgccaatcccgcaacgaccttctctccggccagaatcaacagcttcatcacccagtacagcaccggacaggtggctgtcaaaatagaatgggaaatccagaaggagcggtccaagagatggaacccagaggtccagttcacgtccaactacggagcacaggactcgcttctctgggctcccgacaacgccggagcctacaaagagcccagggccattggatcccgatacctcaccaaccacctctag

SEQ ID NO: 524 - DNA, 1173 bp, unidentified
  source 1..1173: mol_type = unassigned DNA; note = Bovine adeno-associated virus
atggcgctggtaagctggctggtggaacatggcatcacttccgagaagcagtggattcaggagaatcaggagagctacctgtccttcaactccacgggaaactctcggagccagattaaagccgcgcttgacaacgcgtcaaaaattatgagtctgaccaaatctgcctcagactatctcgtgggacagactgttccagaggacatttctgaaaacagaatctggcagatttttgatctcaacggctacgacccggcatacgcgggctctgttctctacggctggtgcactcgcgcctttggaaagaggaacaccgtctggctgtatggacccgcgaccaccggaaagaccaacatcgcggaagccatctctcacaccgtgcccttttatggctgtgtgaactggactaatgagaactttccctttaatgactgtgtggaaaaaatgttgatctggtgggaggagggaaagatgaccagcaaggtggtggaacccgccaaggccatcttgggggggtctagagtacgagtggatcaaaaatgtaaatcctctgtacaagtagactctaccccggtgattatcacctccaatactaacatgtgtgtggtggtggatgggaactccacgacctttgaacaccagcagccgctggaagaccgcatgttcagatttgaactcatgcggcggctcccgccagattttggcaagattaccaagcaggaagtcaaagacttttttgcttgggcaaaggtcaaccaggtgccggtgactcacgagtttatggttcccaagaaagtggcgggaactgagagggcggagacttctagaaaacgcccactggatgacgtcaccaataccaactataaaagtccggagaagcgggcccggctctcagttgttcctgagacgcctcgcagttcagacgtgcctgtagagcccgctcctctgcgacctctcaactggtcttccaggtatgaatgcagatgtgactatcatgctaaatttgactctgtaacgggggaatgtgacgagtgtgaatatttgaatcggggcaaaaatggctgtatctttcataatgctacacattgtcaaatttgtcacgctgttcctccatgggaaaaggaaaatgtgtcagattttaatgattttgatgactgtaataaagagcagtaa

SEQ ID NO: 525 - DNA, 1833 bp, unidentified
  source 1..1833: mol_type = unassigned DNA; note = Bovine adeno-associated virus
atggctaccttctatgaagtcattgttcgcgttccatttgatgtggaagagcacctgcctggaatttctgacaactttgtagactgggtaactggtcaaatttgggagctgcctcccgagtcagatttgaatttgactctgattgagcagcctcagctgacggtggctgacagaattcgccgcgtgttcctgtacgagtggaacaaattttccaagcaggagagcaaattctttgtgcagtttgaaaagggatctgaatattttcatctgcacacgctcgtggagacctccggcatctcttctatggtccttggccgctacgtgagtcagattcgcgcccagctggtgaaggtggtgttccagaacattgagccgcggattaacgactgggtcgccatcaccaaggtaaagaagggcggagccaataaggtggtggattctgggtatattcccgcctacctgctgccgaaggtccaaccagagcttcagtgggcgtggactaacctcgaagagtataaattggccgccctcaatctggaggagcgcaaacggctcgtcgctcagtttcagcttgagtcctcgcagcgctcgcaagaggcatcttcccagagggacgtttcggctgacccggtcatcaagagcaagacttcccagaaatacatggcgctggtaagctggctggtggaacatggcatcacttccgagaagcagtggattcaggagaatcaggagagctacctgtccttcaactccacgggaaactctcggagccagattaaagccgcgcttgacaacgcgtcaaaaattatgagtctgaccaaatctgcctcagactatctcgtgggacagactgttccagaggacatttctgaaaacagaatctggcagatttttgatctcaacggctacgacccggcatacgcgggctctgttctctacggctggtgcactcgcgcctttggaaagaggaacaccgtctggctgtatggacccgcgaccaccggaaagaccaacatcgcggaagccatctctcacaccgtgcccttttatggctgtgtgaactggactaatgagaactttccctttaatgactgtgtggaaaaaatgttgatctggtgggaggagggaaagatgaccagcaaggtggtggaacccgccaaggccatcttgggggggtctagagtacgagtggatcaaaaatgtaaatcctctgtacaagtagactctaccccggtgattatcacctccaatactaacatgtgtgtggtggtggatgggaactccacgacctttgaacaccagcagccgctggaagaccgcatgttcagatttgaactcatgcggcggctcccgccagattttggcaagattaccaagcaggaagtcaaagacttttttgcttgggcaaaggtcaaccaggtgccggtgactcacgagtttatggttcccaagaaagtggcgggaactgagagggcggagacttctagaaaacgcccactggatgacgtcaccaataccaactataaaagtccggagaagcgggcccggctctcagttgttcctgagacgcctcgcagttcagacgtgcctgtagagcccgctcctctgcgacctctcaactggtcttccaggtatgaatgcagatgtgactatcatgctaaatttgactctgtaacgggggaatgtgacgagtgtgaatatttgaatcggggcaaaaatggctgtatctttcataatgctacacattgtcaaatttgtcacgctgttcctccatgggaaaaggaaaatgtgtcagattttaatgattttgatgactgtaataaagagcagtaa

SEQ ID NO: 526 - DNA, 2211 bp, unidentified
  source 1..2211: mol_type = unassigned DNA; note = Bovine adeno-associated virus
atgtcttttgttgaccaccctccagattggttggaatcgatcggcgacggctttcgtgaatttctcggccttgaggcgggtcccccgaaacccaaggccaatcaacagaagcaagataacgctcgaggtcttgtgcttcctgggtacaagtatcttggtcctgggaacggccttgataagggcgatcctgtcaattttgctgacgaggttgcccgagagcacgacctctcctaccagaaacagcttgaggcgggcgataacccttacctcaagtacaaccacgcggacgcagagtttcaggagaaactcgcttctgacacttcttttgggggaaaccttgggaaggctgttttccaggctaaaaagaggattctcgaacctcttggcctggttgagacgccggataaaacggcgcctgcggcaaaaaagaggcctctagagcagagtcctcaagagccagactcctcgagcggagttggcaagaaaggcaaacagcctgccagaaagagactcaactttgacgacgaacctggagccggagacgggcctcccccagaaggaccatcttccggagctatgtctactgagactgaaatgcgtgcagcagctggcggaaatggtggcgatgcgggacaaggtgccgagggagtgggtaatgcctccggtgattggcattgcgattccacttggtcagagagccacgtcaccaccacctcaacccgcacctgggtcctgccgacctacaacaaccacctgtacctgcggctcggctcgagcaacgccagcgacaccttcaacggattctccaccccctggggatactttgactttaaccgcttccactgccacttctcgccaagagactggcaaaggctcatcaacaaccactggggactgcgccccaaaagcatgcaagtccgcatcttcaacatccaagttaaggaggtcacgacgtctaacggggagacgaccgtatccaacaacctcaccagcacggtccagatctttgcggacagcacgtacgagctcccgtacgtgatggatgcaggtcaggagggcagcttgcctcctttccccaacgacgtgttcatggtgcctcagtacgggtactgcggactggtaaccggaggcagctctcaaaaccagacagacagaaatgccttctactgtctggagtactttcccagccagatgctgagaaccggaaacaactttgagatggtgtacaagtttgaaaacgtgcccttccactccatgtacgctcacagccagagcctggataggctgatgaacccgctgctggaccagtacctgtgggagctccagtctaccacctctggaggaactctcaaccagggcaattcagccaccaactttgccaagctgaccaaaacaaacttttctggctaccgcaaaaactggctcccggggcccatgatgaagcagcagagattctccaagactgccagtcaaaactacaagattccccagggaagaaacaacagtctgctccattatgagaccagaactaccctcgacggaagatggagcaattttgccccgggaacggccatggcaaccgcagccaacgacgccaccgacttctctcaggcccagctcatctttgcggggcccaacatcaccggcaacaccaccacagatgccaataacctgatgttcacttcagaagatgaacttagggccaccaacccccgggacactgacctgtttggccacctggcaaccaaccagcaaaacgccaccaccgttcctaccgtagacgacgtggacggagtcggcgtgtacccgggaatggtgtggcaggacagagacatttactaccaagggcccatttgggccaaaattccacacacggatggacactttcacccgtctcctctcattggcggatttggactgaaaagcccgcctccacaaatattcatcaaaaacactcctgtacccgccaatcccgcaacgaccttctctccggccagaatcaacagcttcatcacccagtacagcaccggacaggtggctgtcaaaatagaatgggaaatccagaaggagcggtccaagagatggaacccagaggtccagttcacgtccaactacggagcacaggactcgcttctctgggctcccgacaacgccggagcctacaaagagcccagggccattggatcccgatacctcaccaaccacctctag

SEQ ID NO: 527 - DNA, 4694 bp, unidentified
  source 1..4694: mol_type = unassigned DNA; note = Bovine adeno-associated virus
gtggcactcccccccctgtcgcgttcgctcgttcgctggctcgattgggggggtggcagctcaaagagctgccagacgacggccctctgggccgtcgcccccccaatcgagccagcgaacgagcgaacgcgacaggggggggagtgccacactctctagcaagggggttttgtaggtggtgatgtcattgttgatgtcattatagttgtcacgcgatagttaatgattaacagtcatgtgatgtgtgttatccaataggatgaaagcgcgcgaatgagatctcgcgagacttccggggtataaaaggggtgagtgaacgagcccgccgccattctctgctctggactgctagaggaccctcgctgccatggctaccttctatgaagtcattgttcgcgttccatttgatgtggaagagcacctgcctggaatttctgacaactttgtagactgggtaactggtcaaatttgggagctgcctcccgagtcagatttgaatttgactctgattgagcagcctcagctgacggtggctgacagaattcgccgcgtgttcctgtacgagtggaacaaattttccaagcaggagagcaaattctttgtgcagtttgaaaagggatctgaatattttcatctgcacacgctcgtggagacctccggcatctcttctatggtccttggccgctacgtgagtcagattcgcgcccagctggtgaaggtggtgttccagaacattgagccgcggattaacgactgggtcgccatcaccaaggtaaagaagggcggagccaataaggtggtggattctgggtatattcccgcctacctgctgccgaaggtccaaccagagcttcagtgggcgtggactaacctcgaagagtataaattggccgccctcaatctggaggagcgcaaacggctcgtcgctcagtttcagcttgagtcctcgcagcgctcgcaagaggcatcttcccagagggacgtttcggctgacccggtcatcaagagcaagacttcccagaaatacatggcgctggtaagctggctggtggaacatggcatcacttccgagaagcagtggattcaggagaatcaggagagctacctgtccttcaactccacgggaaactctcggagccagattaaagccgcgcttgacaacgcgtcaaaaattatgagtctgaccaaatctgcctcagactatctcgtgggacagactgttccagaggacatttctgaaaacagaatctggcagatttttgatctcaacggctacgacccggcatacgcgggctctgttctctacggctggtgcactcgcgcctttggaaagaggaacaccgtctggctgtatggacccgcgaccaccggaaagaccaacatcgcggaagccatctctcacaccgtgcccttttatggctgtgtgaactggactaatgagaactttccctttaatgactgtgtggaaaaaatgttgatctggtgggaggagggaaagatgaccagcaaggtggtggaacccgccaaggccatcttgggggggtctagagtacgagtggatcaaaaatgtaaatcctctgtacaagtagactctaccccggtgattatcacctccaatactaacatgtgtgtggtggtggatgggaactccacgacctttgaacaccagcagccgctggaagaccgcatgttcagatttgaactcatgcggcggctcccgccagattttggcaagattaccaagcaggaagtcaaagacttttttgcttgggcaaaggtcaaccaggtgccggtgactcacgagtttatggttcccaagaaagtggcgggaactgagagggcggagacttctagaaaacgcccactggatgacgtcaccaataccaactataaaagtccggagaagcgggcccggctctcagttgttcctgagacgcctcgcagttcagacgtgcctgtagagcccgctcctctgcgacctctcaactggtcttccaggtatgaatgcagatgtgactatcatgctaaatttgactctgtaacgggggaatgtgacgagtgtgaatatttgaatcggggcaaaaatggctgtatctttcataatgctacacattgtcaaatttgtcacgctgttcctccatgggaaaaggaaaatgtgtcagattttaatgattttgatgactgtaataaagagcagtaaataaagtgagtagtcatgtcttttgttgaccaccctccagattggttggaatcgatcggcgacggctttcgtgaatttctcggccttgaggcgggtcccccgaaacccaaggccaatcaacagaagcaagataacgctcgaggtcttgtgcttcctgggtacaagtatcttggtcctgggaacggccttgataagggcgatcctgtcaattttgctgacgaggttgcccgagagcacgacctctcctaccagaaacagcttgaggcgggcgataacccttacctcaagtacaaccacgcggacgcagagtttcaggagaaactcgcttctgacacttcttttgggggaaaccttgggaaggctgttttccaggctaaaaagaggattctcgaacctcttggcctggttgagacgccggataaaacggcgcctgcggcaaaaaagaggcctctagagcagagtcctcaagagccagactcctcgagcggagttggcaagaaaggcaaacagcctgccagaaagagactcaactttgacgacgaacctggagccggagacgggcctcccccagaaggaccatcttccggagctatgtctactgagactgaaatgcgtgcagcagctggcggaaatggtggcgatgcgggacaaggtgccgagggagtgggtaatgcctccggtgattggcattgcgattccacttggtcagagagccacgtcaccaccacctcaacccgcacctgggtcctgccgacctacaacaaccacctgtacctgcggctcggctcgagcaacgccagcgacaccttcaacggattctccaccccctggggatactttgactttaaccgcttccactgccacttctcgccaagagactggcaaaggctcatcaacaaccactggggactgcgccccaaaagcatgcaagtccgcatcttcaacatccaagttaaggaggtcacgacgtctaacggggagacgaccgtatccaacaacctcaccagcacggtccagatctttgcggacagcacgtacgagctcccgtacgtgatggatgcaggtcaggagggcagcttgcctcctttccccaacgacgtgttcatggtgcctcagtacgggtactgcggactggtaaccggaggcagctctcaaaaccagacagacagaaatgccttctactgtctggagtactttcccagccagatgctgagaaccggaaacaactttgagatggtgtacaagtttgaaaacgtgcccttccactccatgtacgctcacagccagagcctggataggctgatgaacccgctgctggaccagtacctgtgggagctccagtctaccacctctggaggaactctcaaccagggcaattcagccaccaactttgccaagctgaccaaaacaaacttttctggctaccgcaaaaactggctcccggggcccatgatgaagcagcagagattctccaagactgccagtcaaaactacaagattccccagggaagaaacaacagtctgctccattatgagaccagaactaccctcgacggaagatggagcaattttgccccgggaacggccatggcaaccgcagccaacgacgccaccgacttctctcaggcccagctcatctttgcggggcccaacatcaccggcaacaccaccacagatgccaataacctgatgttcacttcagaagatgaacttagggccaccaacccccgggacactgacctgtttggccacctggcaaccaaccagcaaaacgccaccaccgttcctaccgtagacgacgtggacggagtcggcgtgtacccgggaatggtgtggcaggacagagacatttactaccaagggcccatttgggccaaaattccacacacggatggacactttcacccgtctcctctcattggcggatttggactgaaaagcccgcctccacaaatattcatcaaaaacactcctgtacccgccaatcccgcaacgaccttctctccggccagaatcaacagcttcatcacccagtacagcaccggacaggtggctgtcaaaatagaatgggaaatccagaaggagcggtccaagagatggaacccagaggtccagttcacgtccaactacggagcacaggactcgcttctctgggctcccgacaacgccggagcctacaaagagcccagggccattggatcccgatacctcaccaaccacctctagcccaattctgttgcataccctcaataaaccgtgtattcgtttcagtaaaatactgcctcttgtggtcattcggcgtacaacagcttacaacaacaacaaaacccccttgctagagagtgtggcactcccccccctgtcgcgttcgctcgttcgctggctcgattgggggggtggcagctcaaagagctgccagacgacggccctctgggccgtcgcccccccaatcgagccagcgaacgagcgaacgcgacaggggggggagtgccac

SEQ ID NO: 528 - protein, 390 aa, unidentified
  source 1..390: note = Bovine adeno-associated virus
MALVSWLVEHGITSEKQWIQENQESYLSFNSTGNSRSQIKAALDNASKIMSLTKSASDYLVGQTVPEDISENRIWQIFDLNGYDPAYAGSVLYGWCTRAFGKRNTVWLYGPATTGKTNIAEAISHTVPFYGCVNWTNENFPFNDCVEKMLIWWEEGKMTSKVVEPAKAILGGSRVRVDQKCKSSVQVDSTPVIITSNTNMCVVVDGNSTTFEHQQPLEDRMFRFELMRRLPPDFGKITKQEVKDFFAWAKVNQVPVTHEFMVPKKVAGTERAETSRKRPLDDVTNTNYKSPEKRARLSVVPETPRSSDVPVEPAPLRPLNWSSRYECRCDYHAKFDSVTGECDECEYLNRGKNGCIFHNATHCQICHAVPPWEKENVSDFNDFDDCNKEQ

SEQ ID NO: 529 - protein, 610 aa, unidentified
  source 1..610: note = Bovine adeno-associated virus
MATFYEVIVRVPFDVEEHLPGISDNFVDWVTGQIWELPPESDLNLTLIEQPQLTVADRIRRVFLYEWNKFSKQESKFFVQFEKGSEYFHLHTLVETSGISSMVLGRYVSQIRAQLVKVVFQNIEPRINDWVAITKVKKGGANKVVDSGYIPAYLLPKVQPELQWAWTNLEEYKLAALNLEERKRLVAQFQLESSQRSQEASSQRDVSADPVIKSKTSQKYMALVSWLVEHGITSEKQWIQENQESYLSFNSTGNSRSQIKAALDNASKIMSLTKSASDYLVGQTVPEDISENRIWQIFDLNGYDPAYAGSVLYGWCTRAFGKRNTVWLYGPATTGKTNIAEAISHTVPFYGCVNWTNENFPFNDCVEKMLIWWEEGKMTSKVVEPAKAILGGSRVRVDQKCKSSVQVDSTPVIITSNTNMCVVVDGNSTTFEHQQPLEDRMFRFELMRRLPPDFGKITKQEVKDFFAWAKVNQVPVTHEFMVPKKVAGTERAETSRKRPLDDVTNTNYKSPEKRARLSVVPETPRSSDVPVEPAPLRPLNWSSRYECRCDYHAKFDSVTGECDECEYLNRGKNGCIFHNATHCQICHAVPPWEKENVSDFNDFDDCNKEQ

SEQ ID NO: 530 - protein, 538 aa, unidentified
  source 1..538: note = Bovine adeno-associated virus
MRAAAGGNGGDAGQGAEGVGNASGDWHCDSTWSESHVTTTSTRTWVLPTYNNHLYLRLGSSNASDTFNGFSTPWGYFDFNRFHCHFSPRDWQRLINNHWGLRPKSMQVRIFNIQVKEVTTSNGETTVSNNLTSTVQIFADSTYELPYVMDAGQEGSLPPFPNDVFMVPQYGYCGLVTGGSSQNQTDRNAFYCLEYFPSQMLRTGNNFEMVYKFENVPFHSMYAHSQSLDRLMNPLLDQYLWELQSTTSGGTLNQGNSATNFAKLTKTNFSGYRKNWLPGPMMKQQRFSKTASQNYKIPQGRNNSLLHYETRTTLDGRWSNFAPGTAMATAANDATDFSQAQLIFAGPNITGNTTTDANNLMFTSEDELRATNPRDTDLFGHLATNQQNATTVPTVDDVDGVGVYPGMVWQDRDIYYQGPIWAKIPHTDGHFHPSPLIGGFGLKSPPPQIFIKNTPVPANPATTFSPARINSFITQYSTGQVAVKIEWEIQKERSKRWNPEVQFTSNYGAQDSLLWAPDNAGAYKEPRAIGSRYLTNHL

SEQ ID NO: 531 - protein, 736 aa, synthetic construct
  REGION 1..736: note = source = /note="Description of Artificial Sequence: Synthetic polypeptide"
MSFVDHPPDWLESIGDGFREFLGLEAGPPKPKANQQKQDNARGLVLPGYKYLGPGNGLDKGDPVNFADEVAREHDLSYQKQLEAGDNPYLKYNHADAEFQEKLASDTSFGGNLGKAVFQAKKRILEPLGLVETPDKTAPAAKKRPLEQSPQEPDSSSGVGKKGKQPARKRLNFDDEPGAGDGPPPEGPSSGAMSTETEMRAAAGGNGGDAGQGAEGVGNASGDWHCDSTWSESHVTTTSTRTWVLPTYNNHLYLRLGSSNASDTFNGFSTPWGYFDFNRFHCHFSPRDWQRLINNHWGLRPKSMQVRIFNIQVKEVTTSNGETTVSNNLTSTVHIFADSTYELPYVMDAGQEGSLPPFPNDVFMVPQYGYCGLVTGGSSQNQTDRNAFYCLEYFPSQMLRTGNNFEMVYKFENVPFHSMYAHSQSLDRLMNPLLDQYLWELQSTTSGGTLNQGNSATNFAKLTNKNFSGYRKNWLPGPMMKQQRFSKTASQNYKIPQGGNNSLLHYETRTTLDRRWSNFAPGTAMATAANDATDFSQAQLIFAGPNITGNTTTDANNLMFTSEDELRATNPRDTDLFGHLATNQQNATTVPTVDDVDGVGVYPGMVWQDRDIYYQGPIWAKIPHTDGHFHPSPLIGGFGLKSPPPQIFIKNTPVPANPATTFSPARINSFITQYSTGQVAVKIEWEIQKERSKRWNPEVQFTSNYGAQDSLLWAPDNAGAYKEPRAIGSRYLTNHL

SEQ ID NO: 532 - protein, 736 aa, synthetic construct
  REGION 1..736: note = source = /note="Description of Artificial Sequence: Synthetic polypeptide"
MSFVDHPPDWLESIGDGFREFLGLEAGPPKPKANQQKQDNARGLVLPGYKYLGPGNGLDKGDPVNFADEVAREHDLSYQKQLEAGDNPYLKYNHADAEFQEKLASDTSFGGNLGKAVFQAKKRILEPLGLVETPDKTAPAAKKRPLEQSPQEPDSSSGVGKKGKQPARKRLNFDDEPGAGDGPPPEGPSSGAMSTETEMRAAAGGNGGDAGQGAEGVGNASGDWHCDSTWSESHVTTTSTRTWVLPTYNNHLYLRLGSSNASDTFNGFSTPWGYFDFNRFHCHFSPRDWQRLINNHWGLRPKSMQVRIFNIQVKEVTTSNGETTVSNNLTSTVQIFADSTYELPYVMDAGQEGSLPPFPNDVFMVPQYGYCGLVTGGSSQNQTDRNAFYCLEYFPSQMLRTGNNFEMVYKFENVPFHSMYAHSQSLDRLMNPLLDQYLWELQSTTSGGTLNQGNSATNFAKLTKTNFSGYRKNWLPGPMMKQQRFSKTASQNYKIPQGRNNSLLHYETRTTLDGRWSNFAPGTAMATAANDATDFSQAQLIFAGPNITGNTTTDANNLMFTSEDELRATNPRDTDLFGHLATNQQNATTVPTVDDVDGVGVYPGMVWQDRDIYYQGPIWAKIPHTDGHFHPSPLIGGFGLKSPPPQIFIKNTPVPANPATTFSPARINSFITQYSTGQVAVKIEWEIQKERSKRWNPEVQFTSNYGAQDSLLWAPDNAGAYKEPRAIGSRYLTNHL

SEQ ID NO: 533 - protein, 736 aa, unidentified; identical to SEQ ID NO: 532
  source 1..736: note = Bovine adeno-associated virus

SEQ ID NO: 534 - protein, 600 aa, unidentified
  source 1..600: note = Bovine adeno-associated virus
TAPAAKKRPLEQSPQEPDSSSGVGKKGKQPARKRLNFDDEPGAGDGPPPEGPSSGAMSTETEMRAAAGGNGGDAGQGAEGVGNASGDWHCDSTWSESHVTTTSTRTWVLPTYNNHLYLRLGSSNASDTFNGFSTPWGYFDFNRFHCHFSPRDWQRLINNHWGLRPKSMQVRIFNIQVKEVTTSNGETTVSNNLTSTVQIFADSTYELPYVMDAGQEGSLPPFPNDVFMVPQYGYCGLVTGGSSQNQTDRNAFYCLEYFPSQMLRTGNNFEMVYKFENVPFHSMYAHSQSLDRLMNPLLDQYLWELQSTTSGGTLNQGNSATNFAKLTKTNFSGYRKNWLPGPMMKQQRFSKTASQNYKIPQGRNNSLLHYETRTTLDGRWSNFAPGTAMATAANDATDFSQAQLIFAGPNITGNTTTDANNLMFTSEDELRATNPRDTDLFGHLATNQQNATTVPTVDDVDGVGVYPGMVWQDRDIYYQGPIWAKIPHTDGHFHPSPLIGGFGLKSPPPQIFIKNTPVPANPATTFSPARINSFITQYSTGQVAVKIEWEIQKERSKRWNPEVQFTSNYGAQDSLLWAPDNAGAYKEPRAIGSRYLTNHL

SEQ ID NO: 535 - DNA, 2214 bp, synthetic construct
  misc_feature 1..2214: note = source = /note="Description of Artificial Sequence: Synthetic polynucleotide"
  source 1..2214: mol_type = other DNA
atggctgccgatggttatcttccagattggctcgaggacactctctctgaaggaataagacagtggtggaagctcaaacctggcccaccaccaccaaagcccgcagagcggcataaggacgacagcaggggtcttgtgcttcctgggtacaagtacctcggacccttcaacggactcgacaagggagagccggtcaacgaggcagacgccgcggccctcgagcacgacaaagcctacgaccggcagctcgacagcggagacaacccgtacctcaagtacaaccacgccgacgcggagtttcaggagcgccttaaagaagatacgtcttttgggggcaacctcgggcgagcagtcttccaggccaaaaagaggcttcttgaacctcttggtctggttgaggaagcggctaagacggctcctggaaagaagaggcctgtagagcagtctcctcaggaaccggactcctcctcgggcatcggcaagacaggccagcagcccgctaaaaagagactcaatttcggtcagactggcgacacagagtcagtcccagaccctcaaccaatcggagaacctcccgcagccccctcaggtgtgggatctcttacaatggcttcaggtggtggcgcaccagtggcagacaataacgaaggtgccgatggagtgggtagttcctcgggaaattggcattgcgattcccaatggctgggggacagagtcatcaccaccagcacccgaacctgggccctgcccacctacaacaatcacctctacaagcaaatctccaacgggacatcgggaggagccaccaacgacaacacctacttcggctacagcaccccctgggggtattttgactttaacagattccactgccacttttcaccacgtgactggcagcgactcatcaacaacaactggggattccggcccaagagactcagcttcaagctcttcaacatccaggtcaaggaggtcacgcagaatgaaggcaccaagaccatcgccaataaccttaccagcacggtccaggtcttcacggactcggagtaccagctgccgtacgttctcggctctgcccaccagggctgcctgcctccgttcccggcggacgtgttcatgattccccagtacggctacctaacactcaacaacggtagtcaggccgtgggacgctcctccttctactgcctggaatactttccttcgcagatgctgagaaccggcaacaacttccagtttacttacaccttcgaggacgtgcctttccacagcagctacgcccacagccagagcttggaccggctgatgaatcctctgattgaccagtacctgtactacttgtctcggactcaaacaacaggaggcacggcaaatacgcagactctgggcttcagccaaggtgggcctaatacaatggccaatcaggcaaagaactggctgccaggaccctgttaccgccaacaacgcgtctcaacgacaaccgggcaaaacaacaatagcaactttgcctggactgctgggaccaaataccatctgaatggaagaaattcattggctaatcctggcatcgctatggcaacacacaaagacgacaaggagcgtttttttcccagtaacgggatcctgatttttggcaaacaaaatgctgccagagacaatgcggattacagcgatgtcatgctcaccagcgaggaagaaatcaaaaccactaaccctgtggctacagaggaatacggtatcgtggcagataacttgcagcagcaaaacacggctcctcaaattggaactgtcaacagccagggggccttacccggtatggtttggcagaaccgggacgtgtacctgcagggtcccatctgggccaagattcctcacacggacggcaacttccacccgtctccgctgatgggcggctttggcctgaaacatcctccgcctcagatcctgatcaagaacacgcctgtacctgcggatcctccgaccaccttcaaccagtcaaagctgaactctttcatcacgcaatacagcaccggacaggtcagcgtggaaattgaatgggagctgcagaaggaaaacagcaagcgctggaaccccgagatccagtacacctccaactactacaaatctacaagtgtggactttgctgttaatacagaaggcgtgtactctgaaccccaccccattggcacccgttacctcacccgtcccctgtaa

SEQ ID NO: 536 - protein, 737 aa, synthetic construct
  REGION 1..737: note = source = /note="Description of Artificial Sequence: Synthetic polypeptide"
MAADGYLPDWLEDTLSEGIRQWWKLKPGPPPPKPAERHKDDSRGLVLPGYKYLGPFNGLDKGEPVNEADAAALEHDKAYDRQLDSGDNPYLKYNHADAEFQERLKEDTSFGGNLGRAVFQAKKRLLEPLGLVEEAAKTAPGKKRPVEQSPQEPDSSSGIGKTGQQPAKKRLNFGQTGDTESVPDPQPIGEPPAAPSGVGSLTMASGGGAPVADNNEGADGVGSSSGNWHCDSQWLGDRVITTSTRTWALPTYNNHLYKQISNGTSGGATNDNTYFGYSTPWGYFDFNRFHCHFSPRDWQRLINNNWGFRPKRLSFKLFNIQVKEVTQNEGTKTIANNLTSTVQVFTDSEYQLPYVLGSAHQGCLPPFPADVFMIPQYGYLTLNNGSQAVGRSSFYCLEYFPSQMLRTGNNFQFTYTFEDVPFHSSYAHSQSLDRLMNPLIDQYLYYLSRTQTTGGTANTQTLGFSQGGPNTMANQAKNWLPGPCYRQQRVSTTTGQNNNSNFAWTAGTKYHLNGRNSLANPGIAMATHKDDKERFFPSNGILIFGKQNAARDNADYSDVMLTSEEEIKTTNPVATEEYGIVADNLQQQNTAPQIGTVNSQGALPGMVWQNRDVYLQGPIWAKIPHTDGNFHPSPLMGGFGLKHPPPQILIKNTPVPADPPTTFNQSKLNSFITQYSTGQVSVEIEWELQKENSKRWNPEIQYTSNYYKSTSVDFAVNTEGVYSEPHPIGTRYLTRPL

SEQ ID NO: 537 - protein, 736 aa, synthetic construct
  REGION 1..736: note = source = /note="Description of Artificial Sequence: Synthetic polypeptide"
MAADGYLPDWLEDNLSEGIREWWDLKPGAPKPKANQQKQDDGRGLVLPGYKYLGPFNGLDKGEPVNAADAAALEHDKAYDQQLKAGDNPYLRYNHADAEFQERLQEDTSFGGNLGRAVFQAKKRVLEPLGLVEEGAKTAPGKKRPVEQSPQEPDSSSGIGKTGQQPAKKRLNFGQTGDTESVPDPQPIGEPPAAPSGVGSLTMASGGGAPVADNNEGADGVGSSSGNWHCDSQWLGDRVITTSTRTWALPTYNNHLYKQISSASTGASNDNHYFGYSTPWGYFDFNRFHCHFSPRDWQRLINNNWGFRPKRLNFKLFNIQVKEVTDNNGVKTIANNLTSTVQVFTDSDYQLPYVLGSAHQGCLPPFPADVFMIPQYGYLTLNNGSQAVGRSSFYCLEYFPSQMLRTGNNFQFTYTFEDVPFHSSYAHSQSLDRLMNPLIDQYLYYLSRTQTTGGTANTQTLGFSQGGPNTMANQAKNWLPGPCYRQQRVSTTTGQNNNSNFAWTAGTKYHLNGRNSLANPGIAMATHKDDKERFFPSNGILIFGKQNAARDNADYSDVMLTSEEEIKTTNPVATEEYGIVADNLQQQNTAPQIGTVNSQGALPGMVWQNRDVYLQGPIWAKIPHTDGNFHPSPLMGGFGLKHPPPQILIKNTPVPADPPTTFNQSKLNSFITQYSTGQVSVEIEWELQKENSKRWNPEIQYTSNYYKSTSVDFAVNTEGVYSEPHPIGTRYLTRPL

SEQ ID NO: 538 - protein, 736 aa, synthetic construct
  REGION 1..736: note = source = /note="Description of Artificial Sequence: Synthetic polypeptide"
MAADGYLPDWLEDTLSEGIRQWWKLKPGPPPPKPAERHKDDSRGLVLPGYKYLGPFNGLDKGEPVNEADAAALEHDKAYDRQLDSGDNPYLKYNHADAEFQERLQGDTSFGGNLGRAVFQAKKRVLEPLGLVEEGAKTAPGKKRPVEQSPQEPDSSSGIGETGQQPAKKRLNFGQTGDSESVPDPQPLGEPPATPAAVGPTTMASGGGAPMADNNEGADGVGSSSGNWHCDSQWLGDRVITTSTRTWALPTYNNHLYKQISSASTGASNDNHYFGYSTPWGYFDFNRFHCHFSPRDWQRLINNNWGFRPKRLSFKLFNIQVKEVTDNNGVKTIANNLTSTVQVFTDSEYQLPYVLGSAHQGCLPPFPADVFMIPQYGYLTLNNGSQAVGRSSFYCLEYFPSQMLRTGNNFTFSYTFEDVPFHSSYAHSQSLDRLMNPLIDQYLYYLSRTQTTGGTANTQTLGFSQGGPNTMANQAKNWLPGPCYRQQRVSTTTGQNNNSNFAWTAGTKYHLNGRNSLANPGIAMATHKDDKERFFPSNGILIFGKQNAARDNADYSDVMLTSEEEIKTTNPVATEEYGIVADNLQQQNTAPQIGTVNSQGALPGMVWQNRDVYLQGPIWAKIPHTDGNFHPSPLMGGFGLKHPPPQILIKNTPVPADPPTTFNQSKLNSFITQYSTGQVSVEIEWELQKENSKRWNPEIQYTSNYYKSTSVDFAVNTEGVYSEPHPIGTRYLTRPL

SEQ ID NO: 539 - DNA, 2181 bp, synthetic construct
  misc_feature 1..2181: note = source = /note="Description of Artificial Sequence: Synthetic polynucleotide"
  source 1..2181: mol_type = other DNA
atgtcttttgttgatcaccctccagattggttggaagaagttggtgaaggtcttcgcgagtttttgggccttgaagcgggcccaccgaaaccaaaacccaatcagcagcatcaagatcaagcccgtggtcttgtgctgcctggttataactatctcggacccggaaacggtctcgatcgaggagagcctgtcaacagggcagacgaggtcgcgcgagagcacgacatctcgtacaacgagcagcttgaggcgggagacaacccctacctcaagtacaaccacgcggacgccgagtttcaggagaagctcgccgacgacacatccttcgggggaaacctcggaaaggcagtctttcaggccaagaaaagggttctcgaaccttttggcctggttgaagagggtgctaagacggcccctaccggaaagcggatagacgaccactttccaaaaagaaagaaggctcggaccgaagaggactccaagccttccacctcgtcagacgccgaagctggacccagcggatcccagcagctgcaaatcccagcacaaccagcctcaagtttgggagctgatacaatgtctgcgggaggtggcggcccattgggcgacaataaccaaggtgccgatggagtgggcaatgcctcgggagattggcattgcgattccacgtggatgggggacagagtcgtcaccaagtccacccgcacctgggtgctgcccagctacaacaaccaccagtaccgagagatcaaaagcggctccgtcgacggaagcaacgccaacgcctactttggatacagcaccccctgggggtactttgactttaaccgcttccacagccactggagcccccgagactggcaaagactcatcaacaactattggggcttcagaccccggtctctcagagtcaaaatcttcaacatccaagtcaaagaggtcacggtgcaggactccaccaccaccatcgccaacaacctcacctccaccgtccaagtgtttacggacgacgactaccaactcccgtacgtcgtcggcaacgggaccgagggatgcctgccggccttccccccgcaggtctttacgctgccgcagtacggctacgcgacgctgaaccgagacaacggagacaacccgacagagcggagcagcttcttttgcctagagtactttcccagcaagatgctgaggacgggcaacaactttgagtttacctacagctttgaagaggtgcccttccactgcagcttcgccccgagccagaacctctttaagctggccaacccgctggtggaccagtacctgtaccgcttcgtgagcacctcggccacgggcgccatccagttccaaaagaacctggcgggcagatacgccaacacctacaaaaactggttcccggggcccatgggccgaacccagggctggaacacgagctctggggtcagcagcaccaacagagtcagcgtcaacaacttttccgtctcaaaccggatgaacctggagggggccagctaccaagtgaacccccagcccaacgggatgacaaacacgctccaaggcagcaaccgctacgcgctggaaaacaccatgatcttcaacgctcaaaacgccacgccgggaactacctcggtgtacccagaggacaatctactgctgaccagcgagagcgagactcagcccgtcaaccgggtggcttacaacacgggcggtcagatggccaccaacgcccagaacgccaccacggctcccacggtcgggacctacaacctccaggaagtgcttcctggcagcgtatggatggagagggacgtgtacctccaaggacccatctgggccaagatcccagagacgggggcgcactttcacccctctccggccatgggcggattcggactcaaacacccgccgcccatgatgctcatcaaaaacacgccggtgcccggcaacatcaccagcttctcggacgtgcccgtcagcagcttcatcacccagtacagcaccgggcaggtcaccgtggagatggaatgggagctcaaaaaggaaaactccaagaggtggaacccagagatccagtacaccaacaactacaacgacccccagtttgtggactttgctccagacggctccggcgaatacagaaccaccagagccatcggaacccgatacctcacccgacccctt

SEQ ID NO: 540 - protein, 726 aa, synthetic construct
  REGION 1..726: note = source = /note="Description of Artificial Sequence: Synthetic polypeptide"
MSFVDHPPDWLEEVGEGLREFLGLEAGPPKPKPNQQHQDQARGLVLPGYNYLGPGNGLDRGEPVNRADEVAREHDISYNEQLEAGDNPYLKYNHADAEFQEKLADDTSFGGNLGKAVFQAKKRVLEPFGLVEEGAKTAPTGKRIDDHFPKRKKARTEEDSKPSTSSDAEAGPSGSQQLQIPAQPASSLGADTMSAGGGGPLGDNNQGADGVGNASGDWHCDSTWMGDRVVTKSTRTWVLPSYNNHQYREIKSGSVDGSNANAYFGYSTPWGYFDFNRFHSHWSPRDWQRLINNYWGFRPRSLRVKIFNIQVKEVTVQDSTTTIANNLTSTVQVFTDDDYQLPYVVGNGTEGCLPAFPPQVFTLPQYGYATLNRDNGDNPTERSSFFCLEYFPSKMLRTGNNFEFTYSFEEVPFHCSFAPSQNLFKLANPLVDQYLYRFVSTSATGAIQFQKNLAGRYANTYKNWFPGPMGRTQGWNTSSGSSTNRVSVNNFSVSNRMNLEGASYQVNPQPNGMTNTLQGSNRYALENTMIFNAQNATPGTTSVYPEDNLLLTSESETQPVNRVAYNTGGQMATNAQNATTAPTVGTYNLQEVLPGSVWMERDVYLQGPIWAKIPETGAHFHPSPAMGGFGLKHPPPMMLIKNTPVPGNITSFSDVPVSSFITQYSTGQVTVEMEWELKKENSKRWNPEIQYTNNYNDPQFVDFAPDGSGEYRTTRAIGTRYLTRPL

SEQ ID NO: 541 - protein, 735 aa, synthetic construct
  REGION 1..735: note = source = /note="Description of Artificial Sequence: Synthetic polypeptide"
MAADGYLPDWLEDTLSEGIRQWWKLKPGPPPPKPAERHKDDSRGLVLPGYKYLGPFNGLDKGEPVNEADAAALEHDKAYDRQLDSGDNPYLKYNHADAEFQERLKEDTSFGGNLGRAVFQAKKRILEPLGLVEEPVKTAPGKKRPVEHSPAEPDSSSGTGKSGQQPARKRLNFGQTGDADSVPDPQPLGQPPAAPSGLGTNTMASGSGAPMADNNEGADGVGNSSGNWHCDSTWMGDRVITTSTRTWALPTYNNHLYKQISSQSGASNDNHYFGYSTPWGYFDFNRFHCHFSPRDWQRLINNNWGFRPKRLSFKLFNIQVKEVTQNDGTTTIANNLTSTVQVFTDSEYQLPYVLGSAHQGCLPPFPADVFMVPQYGYLTLNNGSQAVGRSSFYCLEYFPSQMLRTGNNFTFSYTFEDVPFHSSYAHSQSLDRLMNPLIDQYLYYLSRTNTPSGTTTMSRLQFSQAGASDIRDQSRNWLPGPCYRQQRVSKTAADNNNSDYSWTGATKYHLNGRDSLVNPGPAMASHKDDEEKYFPQSGVLIFGKQDSGKTNVDIEKVMITDEEEIRTTNPVATEQYGSVSTNLQSGNTQAATSDVNTQGVLPGMVWQDRDVYLQGPIWAKIPHTDGHFHPSPLMGGFGLKHPPPQILIKNTPVPANPSTTFSAAKFASFITQYSTGQVSVEIEWELQKENSKRWNPEIQYTSNYNKSVNVDFTVDTNGVYSEPRPIGTRYLTRNL

SEQ ID NO: 542 - DNA, 1797 bp, synthetic construct
  misc_feature 1..1797: note = source = /note="Description of Artificial Sequence: Synthetic polynucleotide"
  source 1..1797: mol_type = other DNA
acggctccgaccggagacaagcggaaaggcgaagacgaacctcgtttgcccgacacttcttcacagactcccaagaaaaacaagaagcctcgcaaggaaagaccttccggcggggcagaagatccgggcgaaggcacctcttccaacgctggagcagcagcacccgcctctagtgtgggatcatctatcatggctgaaggaggtggcggcccagtgggcgatgcaggccagggtgccgatggagtgggcaattcctccggaaattggcattgcgattcccaatggctggaaaacggagtcgtcactcgaaccacccgaacctgggtcttgcccagctacaacaaccacctgtacaaacgaatccaaggacccagcggaggcgacaacaacaacaaattctttggattcagcaccccctggggatactttgactacaatcgattccactgccacttttccccgcgagactggcaacgactcatcaacaacaactggggcatccgtcccaaagcgatgcgctttagactctttaacatccaggttaaagaggtcacggtccaagacttcaacaccaccatcggcaacaacctcaccagtacggtccaggtctttgcggacaaggactaccaactgccgtacgtcctcggatcggctaccgaaggcaccttcccgccgttcccagcggatatctacacgatcccgcagtacgggtactgcacgctaaactacaacaacgaggcggtggatcgttcggccttctactgtctggactactttccctcagacatgctgcggacaggaaataactttgagtttacttacaccttcgaggacgttcctttccatagcatgtttgcccacaaccagacgctagaccggctgatgaatcccctcgtggatcagtacctctgggctttcagctccgtcagccaagcaggctcatctggacgagctcttcattactcgcgggcgactaaaaccaacatggcggctcaatataggaactggttacctgggcctttcttccgtgatcagcaaatctttacgggcgctagcaacatcactaaaaataacgtctttagcgtttgggaaaaaggcaagcaatgggaactcgacaatcggaccaacctaatgcagcccggtcctgcggcagcgaccacctttagcggagaacctgaccgtcaagccatgcaaaacacgctggcttttagcaggaccgtctacgatcaaacgaccgccacgaccgatcgtaaccagatactcatcaccaacgaagacgaaatcagacccaccaactcggtcggtatcgacgcgtggggagcagttcccaccaacaaccagtcgatcgtgacccccggcactcgcgcggccgtcaacaatcaaggggcgcttcccgggatggtgtggcaaaacagagacatttaccctacagggacccatttggccaaaattcccgacactgacaatcacttccatccgtccccgcttattgggcggtttggctgcaagcatccccctccccagattttcattaaaaacacacccgtccctgccaacccttcggaaacgttccagacggccaaagtggcctccttcatcaaccagtactcgaccggacagtgcaccgtcgaaatcttttgggaactcaagaaggaaacctccaagcgctggaaccccgaaatccagttcacctccaactttggcaacgcggccgacatccagtttgccgtctccgacacgggatcctattccgaacctcgtcccatcggtacccgttaccttaccaaacctctgtaa

SEQ ID NO: 543 - DNA, 1989 bp, synthetic construct
  misc_feature 1..1989: note = source = /note="Description of Artificial Sequence: Synthetic polynucleotide"
  source 1..1989: mol_type = other DNA
atgaggtcgtactacgaggtcatcgttcagctgcccaacgacgtcgagagtcaggtacctggaatctccgattcgttcgtcaactggattacgtcgcgagaatggacgttgcctgaggacgccgattgggatttggaccaggtcgatcaagttcaactgacgctcggcgacaaaatccaacgggagattcgaactcattgggggacgatggccaaagaaccggactttcactattttatccaactggaacaaggtgaggtgttctttcatttacacgtcctgctggaaacgtgttccgtaaagccgatggtactcggaagatatatccgacatattcaacaaaaaattgtgagtaaagtctactgcgccacgagcctacgatggaaggatggatgcgtggtgaccaagaccaaaaatttcgggggcgcgaacaaggtccgggccgagtcgtatattcccgcctacctgatcccgaaacagcaaccggaagtgcagtgggcgtggactaacgtgcccgagtatataaaagcgtgcttgcaccgagaactgcgtgccagtctcgcgcgacttcacttcgaggaggcgggcgtctcgcaatccaaggaaaatctcgcgagaactgcagacggcgctcccgtgatgccgacccgcgtcagcaaacgctacatggagctcgtggattggctcgtggagaaggggatcaccaccgagaaggaatggctgctggaaaacagagaaagctttcggagctttcaggcctcgagcaactcggcgcgtcagatcaagacggccctgcaaggcgccattcaggagatgcttctgaccaagacggcggaggactacctcgtcggaaaggatcccgtctcggacgacgacatccgtcagaaccgcatctacaagattctggaactgaaccactacgacccagcgtacgtggggagtattttggtcgggtggtgccagaagaaatggggcaagcgaaacacgctgtggctgttcggacatgcgaccaccggcaagaccaacatcgcggaggctattgcccatgctgtgccgttctatggatgcgttaactggaccaacgagaactttccgttcaacgactgcgtcgaaaaaatgattatctggtgggaggagggcaaaatgaccgccaaagtggtggaaacagccaaggcgattctgggaggatctcgggtgagagtggaccaaaaatgcaaagcttcggttccgatcgaaccgacgccggtcattattaccagtaacaccaacatgtgttatgtcatcgacgggaacacgaccacgttcgagcataagcagccgttggaggacaggatgtttaagctcgaattgctgactcggttgcctgatgactttggtaaggtgaccaaacaggaggtgcgtcaattcttcaggtggtctcaggatcacctgacccctgtgatcccagaattcctagtgcggaaggcggagtctcgcaaaagacccgccccttccggggaaggctatataagcccgacaaagcggcccgcgctcgcagagcagcagcaggcgtcggagagcgcggacccggttcccaccaggtatcgtatcaaatgctcgaaacattgcggtatggataaaatgttgtttccttgccaaatttgtgaatcgatgaacagagatattaatatttgtgctattcataaaacgaccgactgtaaagagtgtttccccgactacggggataaagatgatgtagaactacccccctgtacagaacacaacgtgtctcgttgttatcaatgtcattcgggcgaattgtatcgcgtgacttcggactctgacgagaaacctgcccccgagagtgatgaaggcaccgagccatcctatgctccctgcacgattcaccacctgatgggcaagagtcacgggttagtcacttgcgcggcgtgtcggttgaaaaatagtacgttgcatgatgacttggatgacggtgatctcgaacaataa

SEQ ID NO: 544 - DNA, 1626 bp, synthetic construct
  misc_feature 1..1626: note = source = /note="Description of Artificial Sequence: Synthetic polynucleotide"
  source 1..1626: mol_type = other DNA
atgaggtcgtactacgaggtcatcgttcagctgcccaacgacgtcgagagtcaggtacctggaatctccgattcgttcgtcaactggattacgtcgcgagaatggacgttgcctgaggacgccgattgggatttggaccaggtcgatcaagttcaactgacgctcggcgacaaaatccaacgggagattcgaactcattgggggacgatggccaaagaaccggactttcactattttatccaactggaacaaggtgaggtgttctttcatttacacgtcctgctggaaacgtgttccgtaaagccgatggtactcggaagatatatccgacatattcaacaaaaaattgtgagtaaagtctactgcgccacgagcctacgatggaaggatggatgcgtggtgaccaagaccaaaaatttcgggggcgcgaacaaggtccgggccgagtcgtatattcccgcctacctgatcccgaaacagcaaccggaagtgcagtgggcgtggactaacgtgcccgagtatataaaagcgtgcttgcaccgagaactgcgtgccagtctcgcgcgacttcacttcgaggaggcgggcgtctcgcaatccaaggaaaatctcgcgagaactgcagacggcgctcccgtgatgccgacccgcgtcagcaaacgctacatggagctcgtggattggctcgtggagaaggggatcaccaccgagaaggaatggctgctggaaaacagagaaagctttcggagctttcaggcctcgagcaactcggcgcgtcagatcaagacggccctgcaaggcgccattcaggagatgcttctgaccaagacggcggaggactacctcgtcggaaaggatcccgtctcggacgacgacatccgtcagaaccgcatctacaagattctggaactgaaccactacgacccagcgtacgtggggagtattttggtcgggtggtgccagaagaaatggggcaagcgaaacacgctgtggctgttcggacatgcgaccaccggcaagaccaacatcgcggaggctattgcccatgctgtgccgttctatggatgcgttaactggaccaacgagaactttccgttcaacgactgcgtcgaaaaaatgattatctggtgggaggagggcaaaatgaccgccaaagtggtggaaacagccaaggcgattctgggaggatctcgggtgagagtggaccaaaaatgcaaagcttcggttccgatcgaaccgacgccggtcattattaccagtaacaccaacatgtgttatgtcatcgacgggaacacgaccacgttcgagcataagcagccgttggaggacaggatgtttaagctcgaattgctgactcggttgcctgatgactttggtaaggtgaccaaacaggaggtgcgtcaattcttcaggtggtctcaggatcacctgacccctgtgatcccagaattcctagtgcggaaggcggagtctcgcaaaagacccgccccttccggggaaggctatataagcccgacaaagcggcccgcgctcgcagagcagcagcaggcgtcggagagcgcggacccggttcccaccagattggttggagcggttggtcaaaaagggagtgaatgctgcagctga

SEQ ID NO: 545 - DNA, 1323 bp, synthetic construct
  misc_feature 1..1323: note = source = /note="Description of Artificial Sequence: Synthetic polynucleotide"
  source 1..1323: mol_type = other DNA
atggagctcgtggattggctcgtggagaaggggatcaccaccgagaaggaatggctgctggaaaacagagaaagctttcggagctttcaggcctcgagcaactcggcgcgtcagatcaagacggccctgcaaggcgccattcaggagatgcttctgaccaagacggcggaggactacctcgtcggaaaggatcccgtctcggacgacgacatccgtcagaaccgcatctacaagattctggaactgaaccactacgacccagcgtacgtggggagtattttggtcgggtggtgccagaagaaatggggcaagcgaaacacgctgtggctgttcggacatgcgaccaccggcaagaccaacatcgcggaggctattgcccatgctgtgccgttctatggatgcgttaactggaccaacgagaactttccgttcaacgactgcgtcgaaaaaatgattatctggtgggaggagggcaaaatgaccgccaaagtggtggaaacagccaaggcgattctgggaggatctcgggtgagagtggaccaaaaatgcaaagcttcggttccgatcgaaccgacgccggtcattattaccagtaacaccaacatgtgttatgtcatcgacgggaacacgaccacgttcgagcataagcagccgttggaggacaggatgtttaagctcgaattgctgactcggttgcctgatgactttggtaaggtgaccaaacaggaggtgcgtcaattcttcaggtggtctcaggatcacctgacccctgtgatcccagaattcctagtgcggaaggcggagtctcgcaaaagacccgccccttccggggaaggctatataagcccgacaaagcggcccgcgctcgcagagcagcagcaggcgtcggagagcgcggacccggttcccaccaggtatcgtatcaaatgctcgaaacattgcggtatggataaaatgttgtttccttgccaaatttgtgaatcgatgaacagagatattaatatttgtgctattcataaaacgaccgactgtaaagagtgtttccccgactacggggataaagatgatgtagaactacccccctgtacagaacacaacgtgtctcgttgttatcaatgtcattcgggcgaattgtatcgcgtgacttcggactctgacgagaaacctgcccccgagagtgatgaaggcaccgagccatcctatgctccctgcacgattcaccacctgatgggcaagagtcacgggttagtcacttgcgcggcgtgtcggttgaaaaatagtacgttgcatgatgacttggatgacggtgatctcgaacaataa

SEQ ID NO: 546 - DNA, 960 bp, synthetic construct
  misc_feature 1..960: note = source = /note="Description of Artificial Sequence: Synthetic polynucleotide"
  source 1..960: mol_type = other DNA
atggagctcgtggattggctcgtggagaaggggatcaccaccgagaaggaatggctgctggaaaacagagaaagctttcggagctttcaggcctcgagcaactcggcgcgtcagatcaagacggccctgcaaggcgccattcaggagatgcttctgaccaagacggcggaggactacctcgtcggaaaggatcccgtctcggacgacgacatccgtcagaaccgcatctacaagattctggaactgaaccactacgacccagcgtacgtggggagtattttggtcgggtggtgccagaagaaatggggcaagcgaaacacgctgtggctgttcggacatgcgaccaccggcaagaccaacatcgcggaggctattgcccatgctgtgccgttctatggatgcgttaactggaccaacgagaactttccgttcaacgactgcgtcgaaaaaatgattatctggtgggaggagggcaaaatgaccgccaaagtggtggaaacagccaaggcgattctgggaggatctcgggtgagagtggaccaaaaatgcaaagcttcggttccgatcgaaccgacgccggtcattattaccagtaacaccaacatgtgttatgtcatcgacgggaacacgaccacgttcgagcataagcagccgttggaggacaggatgtttaagctcgaattgctgactcggttgcctgatgactttggtaaggtgaccaaacaggaggtgcgtcaattcttcaggtggtctcaggatcacctgacccctgtgatcccagaattcctagtgcggaaggcggagtctcgcaaaagacccgccccttccggggaaggctatataagcccgacaaagcggcccgcgctcgcagagcagcagcaggcgtcggagagcgcggacccggttcccaccagattggttggagcggttggtcaaaaagggagtgaatgctgcagctga

SEQ ID NO: 547 - DNA, 1608 bp, synthetic construct
  misc_feature 1..1608: note = source = /note="Description of Artificial Sequence: Synthetic polynucleotide"
  source 1..1608: mol_type = other DNA
atggctgaaggaggtggcggcccagtgggcgatgcaggccagggtgccgatggagtgggcaattcctccggaaattggcattgcgattcccaatggctggaaaacggagtcgtcactcgaaccacccgaacctgggtcttgcccagctacaacaaccacctgtacaaacgaatccaaggacccagcggaggcgacaacaacaacaaattctttggattcagcaccccctggggatactttgactacaatcgattccactgccacttttccccgcgagactggcaacgactcatcaacaacaactggggcatccgtcccaaagcgatgcgctttagactctttaacatccaggttaaagaggtcacggtccaagacttcaacaccaccatcggcaacaacctcaccagtacggtccaggtctttgcggacaaggactaccaactgccgtacgtcctcggatcggctaccgaaggcaccttcccgccgttcccagcggatatctacacgatcccgcagtacgggtactgcacgctaaactacaacaacgaggcggtggatcgttcggccttctactgtctggactactttccctcagacatgctgcggacaggaaataactttgagtttacttacaccttcgaggacgttcctttccatagcatgtttgcccacaaccagacgctagaccggctgatgaatcccctcgtggatcagtacctctgggctttcagctccgtcagccaagcaggctcatctggacgagctcttcattactcgcgggcgactaaaaccaacatggcggctcaatataggaactggttacctgggcctttcttccgtgatcagcaaatctttacgggcgctagcaacatcactaaaaataacgtctttagcgtttgggaaaaaggcaagcaatgggaactcgacaatcggaccaacctaatgcagcccggtcctgcggcagcgaccacctttagcggagaacctgaccgtcaagccatgcaaaacacgctggcttttagcaggaccgtctacgatcaaacgaccgccacgaccgatcgtaaccagatactcatcaccaacgaagacgaaatcagacccaccaactcggtcggtatcgacgcgtggggagcagttcccaccaacaaccagtcgatcgtgacccccggcactcgcgcggccgtcaacaatcaaggggcgcttcccgggatggtgtggcaaaacagagacatttaccctacagggacccatttggccaaaattcccgacactgacaatcacttccatccgtccccgcttattgggcggtttggctgcaagcatccccctccccagattttcattaaaaacacacccgtccctgccaacccttcggaaacgttccagacggccaaagtggcctccttcatcaaccagtactcgaccggacagtgcaccgtcgaaatcttttgggaactcaagaaggaaacctccaagcgctggaaccccgaaatccagttcacctccaactttggcaacgcggccgacatccagtttgccgtctccgacacgggatcctattccgaacctcgtcccatcggtacccgttaccttaccaaacctctgtaa

SEQ ID NO: 548 - DNA, 2232 bp, synthetic construct
  misc_feature 1..2232: note = source = /note="Description of Artificial Sequence: Synthetic polynucleotide"
  source 1..2232: mol_type = other DNA
atgtctctcatttctgatgcgattccagattggttggagcggttggtcaaaaagggagtgaatgctgcagctgatttctaccatttggaaagcggtcctcctcgtcctaaggcaaatcagcaaactcaagaatctcttgaaaaggacgattcgagaggtctcgtgttcccaggctacaattatctaggccctttcaacggtctagataaaggagaacccgtcaacgaggcagacgctgccgccttagaacacgacaaggcttacgacctcgaaatcaaggacgggcacaacccgtactttgagtacaacgaggccgacagacgtttccaggaacgtctcaaagacgatacctcctttggaggcaatttaggtaaagccatcttccaggccaaaaagagggttctcgaaccctttggtctggtggaagactcaaagacggctccgaccggagacaagcggaaaggcgaagacgaacctcgtttgcccgacacttcttcacagactcccaagaaaaacaagaagcctcgcaaggaaagaccttccggcggggcagaagatccgggcgaaggcacctcttccaacgctggagcagcagcacccgcctctagtgtgggatcatctatcatggctgaaggaggtggcggcccagtgggcgatgcaggccagggtgccgatggagtgggcaattcctccggaaattggcattgcgattcccaatggctggaaaacggagtcgtcactcgaaccacccgaacctgggtcttgcccagctacaacaaccacctgtacaaacgaatccaaggacccagcggaggcgacaacaacaacaaattctttggattcagcaccccctggggatactttgactacaatcgattccactgccacttttccccgcgagactggcaacgactcatcaacaacaactggggcatccgtcccaaagcgatgcgctttagactctttaacatccaggttaaagaggtcacggtccaagacttcaacaccaccatcggcaacaacctcaccagtacggtccaggtctttgcggacaaggactaccaactgccgtacgtcctcggatcggctaccgaaggcaccttcccgccgttcccagcggatatctacacgatcccgcagtacgggtactgcacgctaaactacaacaacgaggcggtggatcgttcggccttctactgtctggactactttccctcagacatgctgcggacaggaaataactttgagtttacttacaccttcgaggacgttcctttccatagcatgtttgcccacaaccagacgctagaccggctgatgaatcccctcgtggatcagtacctctgggctttcagctccgtcagccaagcaggctcatctggacgagctcttcattactcgcgggcgactaaaaccaacatggcggctcaatataggaactggttacctgggcctttcttccgtgatcagcaaatctttacgggcgctagcaacatcactaaaaataacgtctttagcgtttgggaaaaaggcaagcaatgggaactcgacaatcggaccaacctaatgcagcccggtcctgcggcagcgaccacctttagcggagaacctgaccgtcaagccatgcaaaacacgctggcttttagcaggaccgtctacgatcaaacgaccgccacgaccgatcgtaaccagatactcatcaccaacgaagacgaaatcagacccaccaactcggtcggtatcgacgcgtggggagcagttcccaccaacaaccagtcgatcgtgacccccggcactcgcgcggccgtcaacaatcaaggggcgcttcccgggatggtgtggcaaaacagagacatttaccctacagggacccatttggccaaaattcccgacactgacaatcacttccatccgtccccgcttattgggcggtttggctgcaagcatccccctccccagattttcattaaaaacacacccgtccctgccaacccttcggaaacgttccagacggccaaagtggcctccttcatcaaccagtactcgaccggacagtgcaccgtcgaaatcttttgggaactcaagaaggaaacctccaagcgctggaaccccgaaatccagttcacctccaactttggcaacgcggccgacatccagtttgccgtctccgacacgggatcctattccgaacctcgtcccatcggtacccgttaccttaccaaacctctgtaa

SEQ ID NO: 549 - protein, 535 aa, synthetic construct
  REGION 1..535: note = source = /note="Description of Artificial Sequence: Synthetic polypeptide"
MAEGGGGPVGDAGQGADGVGNSSGNWHCDSQWLENGVVTRTTRTWVLPSYNNHLYKRIQGPSGGDNNNKFFGFSTPWGYFDYNRFHCHFSPRDWQRLINNNWGIRPKAMRFRLFNIQVKEVTVQDFNTTIGNNLTSTVQVFADKDYQLPYVLGSATEGTFPPFPADIYTIPQYGYCTLNYNNEAVDRSAFYCLDYFPSDMLRTGNNFEFTYTFEDVPFHSMFAHNQTLDRLMNPLVDQYLWAFSSVSQAGSSGRALHYSRATKTNMAAQYRNWLPGPFFRDQQIFTGASNITKNNVFSVWEKGKQWELDNRTNLMQPGPAAATTFSGEPDRQAMQNTLAFSRTVYDQTTATTDRNQILITNEDEIRPTNSVGIDAWGAVPTNNQSIVTPGTRAAVNNQGALPGMVWQNRDIYPTGTHLAKIPDTDNHFHPSPLIGRFGCKHPPPQIFIKNTPVPANPSETFQTAKVASFINQYSTGQCTVEIFWELKKETSKRWNPEIQFTSNFGNAADIQFAVSDTGSYSEPRPIGTRYLTKPL

SEQ ID NO: 550 - protein, 440 aa, synthetic construct
  REGION 1..440: note = source = /note="Description of Artificial Sequence: Synthetic polypeptide"
MELVDWLVEKGITTEKEWLLENRESFRSFQASSNSARQIKTALQGAIQEMLLTKTAEDYLVGKDPVSDDDIRQNRIYKILELNHYDPAYVGSILVGWCQKKWGKRNTLWLFGHATTGKTNIAEAIAHAVPFYGCVNWTNENFPFNDCVEKMIIWWEEGKMTAKVVETAKAILGGSRVRVDQKCKASVPIEPTPVIITSNTNMCYVIDGNTTTFEHKQPLEDRMFKLELLTRLPDDFGKVTKQEVRQFFRWSQDHLTPVIPEFLVRKAESRKRPAPSGEGYISPTKRPALAEQQQASESADPVPTRYRIKCSKHCGMDKMLFPCQICESMNRDINICAIHKTTDCKECFPDYGDKDDVELPPCTEHNVSRCYQCHSGELYRVTSDSDEKPAPESDEGTEPSYAPCTIHHLMGKSHGLVTCAACRLKNSTLHDDLDDGDLEQ

SEQ ID NO: 551 - protein, 319 aa, synthetic construct
  REGION 1..319: note = source = /note="Description of Artificial Sequence: Synthetic polypeptide"
MELVDWLVEKGITTEKEWLLENRESFRSFQASSNSARQIKTALQGAIQEMLLTKTAEDYLVGKDPVSDDDIRQNRIYKILELNHYDPAYVGSILVGWCQKKWGKRNTLWLFGHATTGKTNIAEAIAHAVPFYGCVNWTNENFPFNDCVEKMIIWWEEGKMTAKVVETAKAILGGSRVRVDQKCKASVPIEPTPVIITSNTNMCYVIDGNTTTFEHKQPLEDRMFKLELLTRLPDDFGKVTKQEVRQFFRWSQDHLTPVIPEFLVRKAESRKRPAPSGEGYISPTKRPALAEQQQASESADPVPTRLVGAVGQKGSECCS

SEQ ID NO: 552 - protein, 662 aa, synthetic construct
  REGION 1..662: note = source = /note="Description of Artificial Sequence: Synthetic polypeptide"
MRSYYEVIVQLPNDVESQVPGISDSFVNWITSREWTLPEDADWDLDQVDQVQLTLGDKIQREIRTHWGTMAKEPDFHYFIQLEQGEVFFHLHVLLETCSVKPMVLGRYIRHIQQKIVSKVYCATSLRWKDGCVVTKTKNFGGANKVRAESYIPAYLIPKQQPEVQWAWTNVPEYIKACLHRELRASLARLHFEEAGVSQSKENLARTADGAPVMPTRVSKRYMELVDWLVEKGITTEKEWLLENRESFRSFQASSNSARQIKTALQGAIQEMLLTKTAEDYLVGKDPVSDDDIRQNRIYKILELNHYDPAYVGSILVGWCQKKWGKRNTLWLFGHATTGKTNIAEAIAHAVPFYGCVNWTNENFPFNDCVEKMIIWWEEGKMTAKVVETAKAILGGSRVRVDQKCKASVPIEPTPVIITSNTNMCYVIDGNTTTFEHKQPLEDRMFKLELLTRLPDDFGKVTKQEVRQFFRWSQDHLTPVIPEFLVRKAESRKRPAPSGEGYISPTKRPALAEQQQASESADPVPTRYRIKCSKHCGMDKMLFPCQICESMNRDINICAIHKTTDCKECFPDYGDKDDVELPPCTEHNVSRCYQCHSGELYRVTSDSDEKPAPESDEGTEPSYAPCTIHHLMGKSHGLVTCAACRLKNSTLHDDLDDGDLEQ

SEQ ID NO: 553 - protein, 541 aa, synthetic construct
  REGION 1..541: note = source = /note="Description of Artificial Sequence: Synthetic polypeptide"
MRSYYEVIVQLPNDVESQVPGISDSFVNWITSREWTLPEDADWDLDQVDQVQLTLGDKIQREIRTHWGTMAKEPDFHYFIQLEQGEVFFHLHVLLETCSVKPMVLGRYIRHIQQKIVSKVYCATSLRWKDGCVVTKTKNFGGANKVRAESYIPAYLIPKQQPEVQWAWTNVPEYIKACLHRELRASLARLHFEEAGVSQSKENLARTADGAPVMPTRVSKRYMELVDWLVEKGITTEKEWLLENRESFRSFQASSNSARQIKTALQGAIQEMLLTKTAEDYLVGKDPVSDDDIRQNRIYKILELNHYDPAYVGSILVGWCQKKWGKRNTLWLFGHATTGKTNIAEAIAHAVPFYGCVNWTNENFPFNDCVEKMIIWWEEGKMTAKVVETAKAILGGSRVRVDQKCKASVPIEPTPVIITSNTNMCYVIDGNTTTFEHKQPLEDRMFKLELLTRLPDDFGKVTKQEVRQFFRWSQDHLTPVIPEFLVRKAESRKRPAPSGEGYISPTKRPALAEQQQASESADPVPTRLVGAVGQKGSECCS

SEQ ID NO: 554 - protein, 743 aa, synthetic construct
  REGION 1..743: note = source = /note="Description of Artificial Sequence: Synthetic polypeptide"
MSLISDAIPDWLERLVKKGVNAAADFYHLESGPPRPKANQQTQESLEKDDSRGLVFPGYNYLGPFNGLDKGEPVNEADAAALEHDKAYDLEIKDGHNPYFEYNEADRRFQERLKDDTSFGGNLGKAIFQAKKRVLEPFGLVEDSKTAPTGDKRKGEDEPRLPDTSSQTPKKNKKPRKERPSGGAEDPGEGTSSNAGAAAPASSVGSSIMAEGGGGPVGDAGQGADGVGNSSGNWHCDSQWLENGVVTRTTRTWVLPSYNNHLYKRIQGPSGGDNNNKFFGFSTPWGYFDYNRFHCHFSPRDWQRLINNNWGIRPKAMRFRLFNIQVKEVTVQDFNTTIGNNLTSTVQVFADKDYQLPYVLGSATEGTFPPFPADIYTIPQYGYCTLNYNNEAVDRSAFYCLDYFPSDMLRTGNNFEFTYTFEDVPFHSMFAHNQTLDRLMNPLVDQYLWAFSSVSQAGSSGRALHYSRATKTNMAAQYRNWLPGPFFRDQQIFTGASNITKNNVFSVWEKGKQWELDNRTNLMQPGPAAATTFSGEPDRQAMQNTLAFSRTVYDQTTATTDRNQILITNEDEIRPTNSVGIDAWGAVPTNNQSIVTPGTRAAVNNQGALPGMVWQNRDIYPTGTHLAKIPDTDNHFHPSPLIGRFGCKHPPPQIFIKNTPVPANPSETFQTAKVASFINQYSTGQCTVEIFWELKKETSKRWNPEIQFTSNFGNAADIQFAVSDTGSYSEPRPIGTRYLTKPL

SEQ ID NO: 555 - protein, 598 aa, synthetic construct
  REGION 1..598: note = source = /note="Description of Artificial Sequence: Synthetic polypeptide"
TAPTGDKRKGEDEPRLPDTSSQTPKKNKKPRKERPSGGAEDPGEGTSSNAGAAAPASSVGSSIMAEGGGGPVGDAGQGADGVGNSSGNWHCDSQWLENGVVTRTTRTWVLPSYNNHLYKRIQGPSGGDNNNKFFGFSTPWGYFDYNRFHCHFSPRDWQRLINNNWGIRPKAMRFRLFNIQVKEVTVQDFNTTIGNNLTSTVQVFADKDYQLPYVLGSATEGTFPPFPADIYTIPQYGYCTLNYNNEAVDRSAFYCLDYFPSDMLRTGNNFEFTYTFEDVPFHSMFAHNQTLDRLMNPLVDQYLWAFSSVSQAGSSGRALHYSRATKTNMAAQYRNWLPGPFFRDQQIFTGASNITKNNVFSVWEKGKQWELDNRTNLMQPGPAAATTFSGEPDRQAMQNTLAFSRTVYDQTTATTDRNQILITNEDEIRPTNSVGIDAWGAVPTNNQSIVTPGTRAAVNNQGALPGMVWQNRDIYPTGTHLAKIPDTDNHFHPSPLIGRFGCKHPPPQIFIKNTPVPANPSETFQTAKVASFINQYSTGQCTVEIFWELKKETSKRWNPEIQFTSNFGNAADIQFAVSDTGSYSEPRPIGTRYLTKPL

SEQ ID NO: 556 - DNA, 4694 bp, synthetic construct
  misc_feature 1..4694: note = source = /note="Description of Artificial Sequence: Synthetic polynucleotide"
  source 1..4694: mol_type = other DNA
tggccagtttccaagacaggctcgctcgctcactcgggccggggccccaaaggggcccctagcgaccgcttcgcggtcgcggcccgagtgagcgagcgagcctgtcttggaaactggccagcactccggtgaggtaatgccgtcacgtggtcgggaatgggaacgggaaatctcgcgagaacgtaaacaaatataagacggcgccacacggcgctgcgtcatacgcgcgcgcgcaccggcgagatgaggtcgtactacgaggtcatcgttcagctgcccaacgacgtcgagagtcaggtacctggaatctccgattcgttcgtcaactggattacgtcgcgagaatggacgttgcctgaggacgccgattgggatttggaccaggtcgatcaagttcaactgacgctcggcgacaaaatccaacgggagattcgaactcattgggggacgatggccaaagaaccggactttcactattttatccaactggaacaaggtgaggtgttctttcatttacacgtcctgctggaaacgtgttccgtaaagccgatggtactcggaagatatatccgacatattcaacaaaaaattgtgagtaaagtctactgcgccacgagcctacgatggaaggatggatgcgtggtgaccaagaccaaaaatttcgggggcgcgaacaaggtccgggccgagtcgtatattcccgcctacctgatcccgaaacagcaaccggaagtgcagtgggcgtggactaacgtgcccgagtatataaaagcgtgcttgcaccgagaactgcgtgccagtctcgcgcgacttcacttcgaggaggcgggcgtctcgcaatccaaggaaaatctcgcgagaactgcagacggcgctcccgtgatgccgacccgcgtcagcaaacgctacatggagctcgtggattggctcgtggagaaggggatcaccaccgagaaggaatggctgctggaaaacagagaaagctttcggagctttcaggcctcgagcaactcggcgcgtcagatcaagacggccctgcaaggcgccattcaggagatgcttctgaccaagacggcggaggactacctcgtcggaaaggatcccgtctcggacgacgacatccgtcagaaccgcatctacaagattctggaactgaaccactacgacccagcgtacgtggggagtattttggtcgggtggtgccagaagaaatggggcaagcgaaacacgctgtggctgttcggacatgcgaccaccggcaagaccaacatcgcggaggctattgcccatgctgtgccgttctatggatgcgttaactggaccaacgagaactttccgttcaacgactgcgtcgaaaaaatgattatctggtgggaggagggcaaaatgaccgccaaagtggtggaaacagccaaggcgattctgggaggatctcgggtgagagtggaccaaaaatgcaaagcttcggttccgatcgaaccgacgccggtcattattaccagtaacaccaacatgtgttatgtcatcgacgggaacacgaccacgttcgagcataagcagccgttggaggacaggatgtttaagctcgaattgctgactcggttgcctgatgactttggtaaggtgaccaaacaggaggtgcgtcaattcttcaggtggtctcaggatcacctgacccctgtgatcccagaattcctagtgcggaaggcggagtctcgcaaaagacccgccccttccggggaaggctatataagcccgacaaagcggcccgcgctcgcagagcagcagcaggcgtcggagagcgcggacccggttcccaccaggtatcgtatcaaatgctcgaaacattgcggtatggataaaatgttgtttccttgccaaatttgtgaatcgatgaacagagatattaatatttgtgctattcataaaacgaccgactgtaaagagtgtttccccgactacggggataaagatgatgtagaactacccccctgtacagaacacaacgtgtctcgttgttatcaatgtcattcgggcgaattgtatcgcgtgacttcggactctgacgagaaacctgcccccgagagtgatgaaggcaccgagccatcctatgctccctgcacgattcaccacctgatgggcaagagtcacgggttagtcacttgcgcggcgtgtcggttgaaaaatagtacgttgcatgatgacttggatgacggtgatctcgaacaataaatgattgaaatgtagccatgtctctcatttctgatgcgattccagattggttggagcggttggtcaaaaagggagtgaatgctgcagctgatttctaccatttggaaagcggtcctcctcgtcctaaggcaaatcagcaaactcaagaatctcttgaaaaggacgattcgagaggtctcgtgttcccaggctacaattatctaggccctttcaacggtctagataaaggagaacccgtcaacgaggcagacgctgccgccttagaacacgacaaggcttacgacctcgaaatcaaggacgggcacaacccgtactttgagtacaacgaggccgacagacgtttccaggaacgtctcaaagacgatacctcctttggaggcaatttaggtaaagccatcttccaggccaaaaagagggttctcgaaccctttggtctggtggaagactcaaagacggctccgaccggagacaagcggaaaggcgaagacgaacctcgtttgcccgacacttcttcacagactcccaagaaaaacaagaagcctcgcaaggaaagaccttccggcggggcagaagatccgggcgaaggcacctcttccaacgctggagcagcagcacccgcctctagtgtgggatcatctatcatggctgaaggaggtggcggcccagtgggcgatgcaggccagggtgccgatggagtgggcaattcctccggaaattggcattgcgattcccaatggctggaaaacggagtcgtcactcgaaccacccgaacctgggtcttgcccagctacaacaaccacctgtacaaacgaatccaaggacccagcggaggcgacaacaacaacaaattctttggattcagcaccccctggggatactttgactacaatcgattccactgccacttttccccgcgagactggcaacgactcatcaacaacaactggggcatccgtcccaaagcgatgcgctttagactctttaacatccaggttaaagaggtcacggtccaagacttcaacaccaccatcggcaacaacctcaccagtacggtccaggtctttgcggacaaggactaccaactgccgtacgtcctcggatcggctaccgaaggcaccttcccgccgttcccagcggatatctacacgatcccgcagtacgggtactgcacgctaaactacaacaacgaggcggtggatcgttcggccttctactgtctggactactttccctcagacatgctgcggacaggaaataactttgagtttacttacaccttcgaggacgttcctttccatagcatgtttgcccacaaccagacgctagaccggctgatgaatcccctcgtggatcagtacctctgggctttcagctccgtcagccaagcaggctcatctggacgagctcttcattactcgcgggcgactaaaaccaacatggcggctcaatataggaactggttacctgggcctttcttccgtgatcagcaaatctttacgggcgctagcaacatcactaaaaataacgtctttagcgtttgggaaaaaggcaagcaatgggaactcgacaatcggaccaacctaatgcagcccggtcctgcggcagcgaccacctttagcggagaacctgaccgtcaagccatgcaaaacacgctggcttttagcaggaccgtctacgatcaaacgaccgccacgaccgatcgtaaccagatactcatcaccaacgaagacgaaatcagacccaccaactcggtcggtatcgacgcgtggggagcagttcccaccaacaaccagtcgatcgtgacccccggcactcgcgcggccgtcaacaatcaaggggcgcttcccgggatggtgtggcaaaacagagacatttaccctacagggacccatttggccaaaattcccgacactgacaatcacttccatccgtccccgcttattgggcggtttggctgcaagcatccccctccccagattttcattaaaaacacacccgtccctgccaacccttcggaaacgttccagacggccaaagtggcctccttcatcaaccagtactcgaccggacagtgcaccgtcgaaatcttttgggaactcaagaaggaaacctccaagcgctggaaccccgaaatccagttcacctccaactttggcaacgcggccgacatccagtttgccgtctccgacacgggatcctattccgaacctcgtcccatcggtacccgttaccttaccaaacctctgtaaattaaacccttcaataaaccgtttatgcgtaactgtatttccgtctcctgtcgttattcagtcacatgatgcggcattacctcaccggagtgctggccagtttccaagacaggctcgctcgctcactcgggccggggccccaaaggggcccctagcgaccgcttcgcggtcgcggcccgagtgagcgagcgagcctgtcttggaaactggcca

SEQ ID NO: 557 - DNA, 2211 bp, synthetic construct
  misc_feature 1..2211: note = source = /note="Description of Artificial Sequence: Synthetic polynucleotide"
  source 1..2211: mol_type = other DNA
atggctgctgatggttatcttccagattggctcgaggacactctctctgaaggaataagacagtggtggaagctcaaacctggcccaccaccaccaaagcccgcagagcggcataaggacgacagcaggggtcttgtgcttcctgggtacaagtacctcggacccttcaacggactcgacaagggagagccggtcaacgaggcagacgcagcggccctcgagcacgacaaggcctacgaccagcagctcaaggccggtgacaacccctacctcaagtacaaccacgccgacgcggagttccagcagcggcttcagggcgacacatcgtttgggggcaacctcggcagagcagtcttccaggccaaaaagagggttcttgaacctcttggtctggttgagcaagcgggtgagacggctcctggaaagaagagaccgttgattgaatccccccagcagcccgactcctccacgggtatcggcaaaaaaggcaagcagccggctaaaaagagactcaattttggtcagactggcgactcagagtcagtccccgacccacaacctctcggagaacctccagcaacccccgctgctgtgggacctactacaatggcttcaggtggtggcgcaccaatggcagacaataacgaaggcgccgacggagtgggtaatgcctcaggaaattggcattgcgattccacatggctgggcgacagagtcatcaccaccagcacccgcacctgggccttgcccacctacaataaccacctctacaagcaaatctccagtgcttcaacgggggccagcaacgacaaccactacttcggctacagcaccccctgggggtattttgacttcaacagattccactgccacttttcaccacgtgactggcagcgactcatcaacaacaattggggattccggcccaagagactcaacttcaaactcttcaacatccaagtcaaggaggtcacgacgaatgatggcgtcacaaccatcgctaataaccttaccagcacggttcaagtcttctcggactcagactatcagctcccgtacgtgctcgggtcggctcacgagggctgcctcccgccgttcccagcagacgtcttcatggtgccacagtatggatacctcaccctgaacaacgggagtcaggcagtaggacgctcttcattttactgcctggagtactttccttctcagatgctgcgtaccggaaacaactttaccttcagctacacttttgaggacgttcctttccacagcagctacgctcacagccagagtctggaccgtctcatgaatcctctcatcgaccagtacctgtattacctgaacagaactcagaatcagtccggaagtgcccaaaacaaggacttgctgtttagccgggggtctccagctggcatgtctgttcagcccaaaaactggctacctggaccctgttatcggcagcagcgcgtttctaaaacaaaaacagacaacaacaacagcaactttacctggactggtgcttcaaaatataaccttaatgggcgtgaatctataatcaaccctggcactgctatggcctcacacaaagacgacaaagacaagttctttcccatgagcggtgtcatgatttttggaaaggagagcgccggagcttcaaacactgcattggacaatgtcatgatcacagacgaagaggaaatcaaagccactaaccccgtggccaccgaaagatttgggactgtggcagtcaatctccagagcagcagcacagaccctgcgaccggagatgtgcatgttatgggagccttacctggaatggtgtggcaagacagagacgtatacctgcagggtcccatttgggccaaaattcctcacacagatggacactttcacccgtctcctcttatgggcggctttggactcaagaacccgcctcctcagatcctcatcaaaaacacgcctgttcctgcgaatcctccggcggagttttcagctacaaagtttgcttcattcatcacccaatactccacaggacaagtgagtgtggaaattgaatgggagctgcagaaagaaaacagcaagcgctggaatcccgaagtgcagtacacatccaattatgcaaaatctgccaacgttgattttactgtggacaacaatggactttatactgagcctcgccccattggcacccgttacctcacccgtcccctgtaa

SEQ ID NO: 558 - protein, 736 aa, synthetic construct
  REGION 1..736: note = source = /note="Description of Artificial Sequence: Synthetic polypeptide"
MAADGYLPDWLEDTLSEGIRQWWKLKPGPPPPKPAERHKDDSRGLVLPGYKYLGPFNGLDKGEPVNEADAAALEHDKAYDQQLKAGDNPYLKYNHADAEFQQRLQGDTSFGGNLGRAVFQAKKRVLEPLGLVEQAGETAPGKKRPLIESPQQPDSSTGIGKKGKQPAKKRLNFGQTGDSESVPDPQPLGEPPATPAAVGPTTMASGGGAPMADNNEGADGVGNASGNWHCDSTWLGDRVITTSTRTWALPTYNNHLYKQISSASTGASNDNHYFGYSTPWGYFDFNRFHCHFSPRDWQRLINNNWGFRPKRLNFKLFNIQVKEVTTNDGVTTIANNLTSTVQVFSDSDYQLPYVLGSAHEGCLPPFPADVFMVPQYGYLTLNNGSQAVGRSSFYCLEYFPSQMLRTGNNFTFSYTFEDVPFHSSYAHSQSLDRLMNPLIDQYLYYLNRTQNQSGSAQNKDLLFSRGSPAGMSVQPKNWLPGPCYRQQRVSKTKTDNNNSNFTWTGASKYNLNGRESIINPGTAMASHKDDKDKFFPMSGVMIFGKESAGASNTALDNVMITDEEEIKATNPVATERFGTVAVNLQSSSTDPATGDVHVMGALPGMVWQDRDVYLQGPIWAKIPHTDGHFHPSPLMGGFGLKNPPPQILIKNTPVPANPPAEFSATKFASFITQYSTGQVSVEIEWELQKENSKRWNPEVQYTSNYAKSANVDFTVDNNGLYTEPRPIGTRYLTRPL

SEQ ID NO: 559 - DNA, 2211 bp, synthetic construct
  misc_feature 1..2211: note = source = /note="Description of Artificial Sequence: Synthetic polynucleotide"
  source 1..2211: mol_type = other DNA
atggcttccgatggttatcttccagattggctcgaggacaacctctctgagggcatccgcgagtggtgggacttgaaacctggagccccgaaacccaaagccaaccagcaaaagcaggacgacggccggggtctggtgcttcctggctacaagtacctcggacccttcaacggactcgacaagggggagcccgtcaacgcggcggatgcagcggccctcgagcacgacaaggcctacgaccagcagctcagagcgggtgacaatccgtacctgcggtataaccacgccgacgccgagtttcaggagcgtctgcaagaagatacgtcttttgggggcaacctcgggcgagcagtcttccaggccaagaagagggttctcgaaccttttggtctggttgaggaaggtgctaagacggctcctggaaagaaacgtccggtagagcagtcgccacaagagccagactcctcctcgggcattggcaagacaggccagcagcccgctaaaaagagactcaattttggtcagactggcgactcagagtcagtccccgacccacaacctctcggagaacctccagcaacccccgctgctgtgggacctactacaatggcttcaggcggtggcgcaccaatggcagacaataacgaaggcgccgacggagtgggtaatgcctcaggaaattggcattgcgattccacatggctgggcgacagagtcatcaccaccagcacccgaacatgggccttgcccacctataacaaccacctctacaagcaaatctccagtgcttcaacgggggccagcaacgacaaccactacttcggctacagcaccccctgggggtattttgatttcaacagattccactgccatttctcaccacgtgactggcagcgactcatcaacaacaattggggattccggcccaagagactcaacttcaaactcttcaacatccaagtcaaggaggtcacgacgaatgatggcgtcacaaccatcgctaataaccttaccagcacggttcaagtcttctcggactcggagtaccagcttccgtacgtcctcggctctgcgcaccagggctgcctccctccgttcccggcggacgtgttcatgattccgcagtacggctacctaacgctcaacaatggcagccaggcagtgggacggtcatccttttactgcctggaatatttcccatcgcagatgctgagaacgggcaataactttaccttcagctacaccttcgaggacgtgcctttccacagcagctacgcgcacagccagagcctggaccggctgatgaatcctctcatcgaccagtacctgtattacctgaacagaactcagaatcagtccggaagtgcccaaaacaaggacttgctgtttagccgggggtctccagctggcatgtctgttcagcccaaaaactggctacctggaccctgttaccggcagcagcgcgtttctaaaacaaaaacagacaacaacaacagcaactttacctggactggtgcttcaaaatataaccttaatgggcgtgaatctataatcaaccctggcactgctatggcctcacacaaagacgacaaagacaagttctttcccatgagcggtgtcatgatttttggaaaggagagcgccggagcttcaaacactgcattggacaatgtcatgatcacagacgaagaggaaatcaaagccactaaccccgtggccaccgaaagatttgggactgtggcagtcaatctccagagcagcagcacagaccctgcgaccggagatgtgcatgttatgggagccttacctggaatggtgtggcaagacagagacgtatacctgcagggtcccatttgggccaaaattcctcacacagatggacactttcacccgtctcctcttatgggcggctttggacttaagcacccgcctcctcagatcctcatcaaaaacacgcctgttcctgcgaatcctccggcagagttttcggctacaaagtttgcttcattcatcacccagtattctactggccaagtcagcgtggagattgaatgggagctgcagaaagaaaacagcaaacgctggaatcccgaagtgcagtatacatctaactatgcaaaatctgccaacgttgatttcactgtggacaacaatggactttatactgagcctcgtcccattggcacccgttacctcacccgtcccctgtaa

SEQ ID NO: 560 - protein, 736 aa, synthetic construct
  REGION 1..736: note = source = /note="Description of Artificial Sequence: Synthetic polypeptide"
MASDGYLPDWLEDNLSEGIREWWDLKPGAPKPKANQQKQDDGRGLVLPGYKYLGPFNGLDKGEPVNAADAAALEHDKAYDQQLRAGDNPYLRYNHADAEFQERLQEDTSFGGNLGRAVFQAKKRVLEPFGLVEEGAKTAPGKKRPVEQSPQEPDSSSGIGKTGQQPAKKRLNFGQTGDSESVPDPQPLGEPPATPAAVGPTTMASGGGAPMADNNEGADGVGNASGNWHCDSTWLGDRVITTSTRTWALPTYNNHLYKQISSASTGASNDNHYFGYSTPWGYFDFNRFHCHFSPRDWQRLINNNWGFRPKRLNFKLFNIQVKEVTTNDGVTTIANNLTSTVQVFSDSEYQLPYVLGSAHQGCLPPFPADVFMIPQYGYLTLNNGSQAVGRSSFYCLEYFPSQMLRTGNNFTFSYTFEDVPFHSSYAHSQSLDRLMNPLIDQYLYYLNRTQNQSGSAQNKDLLFSRGSPAGMSVQPKNWLPGPCYRQQRVSKTKTDNNNSNFTWTGASKYNLNGRESIINPGTAMASHKDDKDKFFPMSGVMIFGKESAGASNTALDNVMITDEEEIKATNPVATERFGTVAVNLQSSSTDPATGDVHVMGALPGMVWQDRDVYLQGPIWAKIPHTDGHFHPSPLMGGFGLKHPPPQILIKNTPVPANPPAEFSATKFASFITQYSTGQVSVEIEWELQKENSKRWNPEVQYTSNYAKSANVDFTVDNNGLYTEPRPIGTRYLTRPL

SEQ ID NO: 561 - DNA, 2211 bp, synthetic construct
  misc_feature 1..2211: note = source = /note="Description of Artificial Sequence: Synthetic polynucleotide"
  source 1..2211: mol_type = other DNA
atggctgctgatggttatcttccagattggctcgaggacactctctctgaaggaataagacagtggtggaagctcaaacctggcccaccaccaccaaagcccgcagagcggcataaggacgacagcaggggtcttgtgcttcctgggtacaagtacctcggacccttcaacggactcgacaagggagagccggtcaacgaggcagacgcagcggccctcgagcacgacaaggcctacgaccagcagctcaaggccggtgacaacccctacctcaagtacaaccacgccgacgcggagttccagcagcggcttcagggcgacacatcgtttgggggcaacctcggcagagcagtcttccaggccaaaaagagggttcttgaacctcttggtctggttgagcaagcgggtgagacggctcctggaaagaagagaccgttgattgaatccccccagcagcccgactcctccacgggtatcggcaaaaaaggcaagcagccggctaaaaagagactcaattttggtcagactggcgactcagagtcagtccccgacccacaacctctcggagaacctccagcaacccccgctgctgtgggacctactacaatggcttcaggtggtggcgcaccaatggcagacaataacgaaggcgccgacggagtgggtaatgcctcaggaaattggcattgcgattccacatggctgggcgacagagtcatcaccaccagcacccgcacctgggccttgcccacctacaataaccacctctacaagcaaatctccagtgcttcaacgggggccagcaacgacaaccactacttcggctacagcaccccctgggggtattttgacttcaacagattccactgccacttttcaccacgtgactggcagcgactcatcaacaacaattggggattccggcccaagagactcaacttcaaactcttcaacatccaagtcaaggaggtcacgacgaatgatggcgtcacaaccatcgctaataaccttaccagcacggttcaagtcttctcggactcagactatcagctcccgtacgtgctcgggtcggctcacgagggctgcctcccgccgttcccagcagacgtcttcatggtgccacagtatggatacctcaccctgaacaacgggagtcaggcagtaggacgctcttcattttactgcctggagtactttccttctcagatgctgcgtaccggaaacaactttaccttcagctacacttttgaggacgttcctttccacagcagctacgctcacagccagagtctggaccgtctcatgaatcctctcatcgaccagtacctgtattacctgaacagaactcagaatcagtccggaagtgcccaaaacaaggacttgctgtttagccgggggtctccaactggcatgtctgttcagcccaaaaactggctacctggaccctgttatcggcagcagcgcgtttctaaaacaaaaacagacaacaacaacagcaactttacctggactggtgcttcaaaatataaccttaatgggcgtgaatctataatcaaccctggcactgctatggcctcacacaaagacgacaaagacaagttctttcccatgagcggtgtcatgatttttggaaaggagagcgccggagcttcaaacactgcattggacaatgtcatgatcacagacgaagaggaaatcaaagccactaaccccgtggccactgaaagatttgggactgtggcagtcaatctccagagcagcagcacagaccctgcgaccggagatgtgcatgccatgggagccttacctggaatggtgtggcaagacagagacgtatacctgcagggtcctatttgggccaaaattcctcacacggatggacactttcacccgtctcctctcatgggcggctttggactcaagaacccgcctcctcagatcctcatcaaaaacacgcctgttcctgcgaatcctccggcggagttttcagctacaaagtttgcttcattcatcacccagtattccacaggacaagtgagcgtggagattgaatgggagctgcagaaagaaaacagcaaacgctggaatcccgaagtgcagtatacatctaactatgcaaaatctgccaacgttgatttcactgtggacaacaatggactttatactgagcctcgccccattggcacccgttacctcacccgtcccctgtaa

SEQ ID NO: 562 - protein, 736 aa, synthetic construct
  REGION 1..736: note = source = /note="Description of Artificial Sequence: Synthetic polypeptide"
MAADGYLPDWLEDTLSEGIRQWWKLKPGPPPPKPAERHKDDSRGLVLPGYKYLGPFNGLDKGEPVNEADAAALEHDKAYDQQLKAGDNPYLKYNHADAEFQQRLQGDTSFGGNLGRAVFQAKKRVLEPLGLVEQAGETAPGKKRPLIESPQQPDSSTGIGKKGKQPAKKRLNFGQTGDSESVPDPQPLGEPPATPAAVGPTTMASGGGAPMADNNEGADGVGNASGNWHCDSTWLGDRVITTSTRTWALPTYNNHLYKQISSASTGASNDNHYFGYSTPWGYFDFNRFHCHFSPRDWQRLINNNWGFRPKRLNFKLFNIQVKEVTTNDGVTTIANNLTSTVQVFSDSDYQLPYVLGSAHEGCLPPFPADVFMVPQYGYLTLNNGSQAVGRSSFYCLEYFPSQMLRTGNNFTFSYTFEDVPFHSSYAHSQSLDRLMNPLIDQYLYYLNRTQNQSGSAQNKDLLFSRGSPTGMSVQPKNWLPGPCYRQQRVSKTKTDNNNSNFTWTGASKYNLNGRESIINPGTAMASHKDDKDKFFPMSGVMIFGKESAGASNTALDNVMITDEEEIKATNPVATERFGTVAVNLQSSSTDPATGDVHAMGALPGMVWQDRDVYLQGPIWAKIPHTDGHFHPSPLMGGFGLKNPPPQILIKNTPVPANPPAEFSATKFASFITQYSTGQVSVEIEWELQKENSKRWNPEVQYTSNYAKSANVDFTVDNNGLYTEPRPIGTRYLTRPL

SEQ ID NO: 563 - DNA, 2211 bp, synthetic construct
  misc_feature 1..2211: note = source = /note="Description of Artificial Sequence: Synthetic polynucleotide"
  source 1..2211: mol_type = other DNA
atggctgccgatggttatcttccagattggctcgaggacaacctctctgagggcattcgcgagtggtgggcgctgaaacctggagccccgaagcccaaagccaaccagcaaaagcaggacgacggccggggtctggtgcttcctggctacaagtacctcggacccttcaacggactcgacaagggggagcccgtcaacgcggcggatgcagcggccctcgagcacgacaaggcctacgaccagcagctcaaagcgggtgacaatccgtacctgcggtataaccacgccgacgccgagtttcaggagcgtctgcaagaagatacgtcttttgggggcaacctcgggcgagcagtcttccaggccaagaagcgggttctcgaacctctcggtctggttgaggaaggcgctaagacggctcctggaaagaaacgtccggtagagcaatcgccacaagagccagactcctcctcgggcatcggcaagacaggccagcagcccgctaaaaagagactcaattttggtcagactggcgactcagagtcagtccccgacccacaacctctcggagaacctccagcaacccccgctgctgtgggacctactacaatggcttcaggcggtggcgcaccaatggcagacaataacgaaggcgccgacggagtgggtaatgcctcaggaaattggcattgcgattccacatggctgggcgacagagtcatcaccaccagcacccgaacatgggccttgcccacctataacaaccacctctacaagcaaatctccagtgcttcgacgggggccagcaacgacaaccactacttcggctacagcaccccctgggggtattttgactttaacagattccactgccacttttcaccacgtgactggcagcgactcatcaacaacaactggggattccggcccaagagactcagcttcaagctcttcaacatccaggtcaaggaggtcacgacgaatgatggcgtcacaaccatcgctaataaccttaccagcacggttcaagtcttctcggactcggagtaccagcttccgtacgtcctcggctctgcgcaccagggctgcctccctccgttcccggcggacgtgttcatgattccgcaatacggctacctgacgctcaacaatggcagccaagccgtgggacgttcatccttttactgcctggaatatttcccttctcagatgctgagaacgggcaacaactttaccttcagctacacctttgaggaagtgcctttccacagcagctacgcgcacagccagagcctggaccggctgatgaatcctctcatcgatcaatacctgtattacctgaacagaactcaaaatcagtccggaagtgcccaaaacaaggacttgctgtttagccgtgggtctccagctggcatgtctgttcagcccaaaaactggctacctggaccctgttatcggcagcagcgcgtttctaaaacaaaaacagacaacaacaacagcaattttacctggactggtgcttcaaaatataacctcaatgggcgtgaatccatcatcaaccctggcactgctatggcctcacataaagacgacgaagacaagttctttcccatgagcggtgtcatgatttttggaaaagagagcgccggagcttcaaacactgcattggacaatgtcatgattacagacgaagaggaaattaaagccactaaccctgtggccaccgaaagatttgggaccgtggcagtcaatttccagagcagcagcacagaccctgcgaccggagatgtgcatgctatgggagcattacctggcatggtgtggcaagatagagacgtgtacctgcagggtcccatttgggccaaaattcctcacacagatggacactttcacccgtctcctcttatgggcggctttggactcaagaacccgcctcctcagatcctcatcaaaaacacgcctgttcctgcgaatcctccggcggagttttcagctacaaagtttgcttcattcatcacccaatactccacaggacaagtgagcgtggagattgaatgggagctgcagaaagaaaacagcaaacgctggaatcccgaagtgcagtatacatctaactatgcaaaatctgccaacattgatttcactgtggacaacaatggactttatactgagcctcgccccattggcacccgttacctcacccgtccccagtaa

SEQ ID NO: 564 - protein, 736 aa, synthetic construct
  REGION 1..736: note = source = /note="Description of Artificial Sequence: Synthetic polypeptide"
MAADGYLPDWLEDNLSEGIREWWALKPGAPKPKANQQKQDDGRGLVLPGYKYLGPFNGLDKGEPVNAADAAALEHDKAYDQQLKAGDNPYLRYNHADAEFQERLQEDTSFGGNLGRAVFQAKKRVLEPLGLVEEGAKTAPGKKRPVEQSPQEPDSSSGIGKTGQQPAKKRLNFGQTGDSESVPDPQPLGEPPATPAAVGPTTMASGGGAPMADNNEGADGVGNASGNWHCDSTWLGDRVITTSTRTWALPTYNNHLYKQISSASTGASNDNHYFGYSTPWGYFDFNRFHCHFSPRDWQRLINNNWGFRPKRLSFKLFNIQVKEVTTNDGVTTIANNLTSTVQVFSDSEYQLPYVLGSAHQGCLPPFPADVFMIPQYGYLTLNNGSQAVGRSSFYCLEYFPSQMLRTGNNFTFSYTFEEVPFHSSYAHSQSLDRLMNPLIDQYLYYLNRTQNQSGSAQNKDLLFSRGSPAGMSVQPKNWLPGPCYRQQRVSKTKTDNNNSNFTWTGASKYNLNGRESIINPGTAMASHKDDEDKFFPMSGVMIFGKESAGASNTALDNVMITDEEEIKATNPVATERFGTVAVNFQSSSTDPATGDVHAMGALPGMVWQDRDVYLQGPIWAKIPHTDGHFHPSPLMGGFGLKNPPPQILIKNTPVPANPPAEFSATKFASFITQYSTGQVSVEIEWELQKENSKRWNPEVQYTSNYAKSANIDFTVDNNGLYTEPRPIGTRYLTRPQ

SEQ ID NO: 565 - DNA, 2211 bp, synthetic construct
  misc_feature 1..2211: note = source = /note="Description of Artificial Sequence: Synthetic polynucleotide"
  source 1..2211: mol_type = other DNA
atggctgccgatggttatcttccagattggctcgaggacaacctctctgagggcattcgcgagtggtgggacttgaaacctggagccccgaaacccaaagccaaccagcaaaagcaggacgacggccggggtctggtgcttcctggctacaagtacctcggacccttcaacggactcgacaagggggagcccgtcaacgcggcggatgcagcggccctcgagcacgacaaggcctacgaccagcagctcaaagcgggtgacaatccgtaccttcggtataaccacgccgacgccgagtttcaggagcgtctgcaagaagatacgtcttttgggggcaacctcgggcgagcagtcttccaggccaaaaagagggttctcgaacctctcggtctggttgaggaagcggctaagacggctcctggaaagaaacgtccggtagagcagtcgccacaagagccagactcctcctcgggcattggcaagacaggccagcagcccgctaaaaagagactcaattttggtcagactggcgactcagagtcagtccccgacccacaacctctcggagaacctcccgcagccccctcaggtgtgggatctcttacaatggcttcaggtggtggcgcaccaatggcagacaataacgaaggcgccgacggagtgggtaatgcctcaggaaattggcattgcgattccacatggctgggcgacagagtcatcaccaccagcacccgcacctgggccttgcccacctacaataaccacctctacaagcaaatctccagtgcttcaacgggggccagcaacgacaaccactacttcggctacagcaccccctgggggtattttgacttcaacagattccactgccacttttcaccacgtgactggcaaagactcatcaacaacaattggggattccggcccaagagactcaacttcaagctcttcaacatccaagtcaaggaggtcacgacgaatgatggcgtcacgaccatcgctaataaccttaccagcacggttcaagtcttctcggactcggagtaccagttgccgtacgtcctcggctctgcgcaccagggctgcctccctccgttcccggcggacgtgttcatgattccgcagtacggctacctaacgctcaacaatggcagccaggcagtgggacggtcatccttttactgcctggaatatttcccatcgcagatgctgagaacgggcaacaactttaccttcagctacacctttgaggaagtgcctttccacagcagctacgcgcacagccagagcctggaccggctgatgaatcctctcatcgaccagtacctgtattacctgaacagaactcaaaatcagtccggaagtgcccaaaacaaggacttgctgtttagccgtgggtctccagctggcatgtctgttcagcccaaaaactggctacctggaccctgttaccggcagcagtgcgtttctaaaacaaaaacagacaacaacaacagcaactttacctggactggtgcttcaaaatataaccttaatgggcgtgaatctataatcaaccctggcactgctatggcctcacacaaagacgacaaagacaagttctttcccatgagcggtgtcatgatttttggaaaggagagcgccggagcttcaaacactgcattggacaatgtcatgatcacagacgaagaggaaatcaaagccactaaccccgtggccaccgaaagatttgggactgtggcagtcaatctccagagcagcagcacagaccctgcgaccggagatgtgcatgttatgggagccttacctggaatggtgtggcaagacagagacgtatacctgcagggtcctatttgggccaaaattcctcacacagatggacactttcacccgtctcctcttatgggcggctttggactcaagaacccgcctcctcagatcctcatcaaaaacacgcctgttcctgcgaatcctccggcggagttttcagctacaaagtttgcttcattcatcacccaatactccacaggacaagtgagcgtggagattgaatgggagctgcagaaagaaaacagcaagcgctggaatcccgaagtgcagtacacatccaattatgcaaaatctgccaacgttgatttcactgtggacaacaatggactttatactgagcctcgccccattggcacccgttacctcacccgtcccctgtaa

SEQ ID NO: 566 - protein, 736 aa, synthetic construct
  REGION 1..736: note = source = /note="Description of Artificial Sequence: Synthetic polypeptide"
MAADGYLPDWLEDNLSEGIREWWDLKPGAPKPKANQQKQDDGRGLVLPGYKYLGPFNGLDKGEPVNAADAAALEHDKAYDQQLKAGDNPYLRYNHADAEFQERLQEDTSFGGNLGRAVFQAKKRVLEPLGLVEEAAKTAPGKKRPVEQSPQEPDSSSGIGKTGQQPAKKRLNFGQTGDSESVPDPQPLGEPPAAPSGVGSLTMASGGGAPMADNNEGADGVGNASGNWHCDSTWLGDRVITTSTRTWALPTYNNHLYKQISSASTGASNDNHYFGYSTPWGYFDFNRFHCHFSPRDWQRLINNNWGFRPKRLNFKLFNIQVKEVTTNDGVTTIANNLTSTVQVFSDSEYQLPYVLGSAHQGCLPPFPADVFMIPQYGYLTLNNGSQAVGRSSFYCLEYFPSQMLRTGNNFTFSYTFEEVPFHSSYAHSQSLDRLMNPLIDQYLYYLNRTQNQSGSAQNKDLLFSRGSPAGMSVQPKNWLPGPCYRQQCVSKTKTDNNNSNFTWTGASKYNLNGRESIINPGTAMASHKDDKDKFFPMSGVMIFGKESAGASNTALDNVMITDEEEIKATNPVATERFGTVAVNLQSSSTDPATGDVHVMGALPGMVWQDRDVYLQGPIWAKIPHTDGHFHPSPLMGGFGLKNPPPQILIKNTPVPANPPAEFSATKFASFITQYSTGQVSVEIEWELQKENSKRWNPEVQYTSNYAKSANVDFTVDNNGLYTEPRPIGTRYLTRPL

SEQ ID NO: 567 - DNA, 2211 bp, synthetic construct
  misc_feature 1..2211: note = source = /note="Description of Artificial Sequence: Synthetic polynucleotide"
  source 1..2211: mol_type = other DNA
atggctgccgatggttatcttccagattggctcgaggacaacctctctgagggcattcgcgaatggtgggacttgaaacctggagccccgaaacccaaagtcaaccagcaaaagcaggacaacgctcggggtcttgtgcttccgggttacaaatacctcggacccttcaacggactcgacaagggggagcccgtcaacgcggcggacgcagcggccctcgagcacgacaaggcctacgaccagcagctcaaagcgggtgacaatccgtaccttcggtataaccacgccgacgccgagtttcaggagcgtctgcaagaagatacgtcttttgggggcaaccttggacgagcagtcttccaggccaagaagagggttctcgaaccttttggtctggttgaggaaggtgctaagacggctcctggaaagaaacgtccggtagagcagtcgccacaagagccagactcctcctcgggcattggcaagacaggccagcagcccgctaaaaagagactcaattttggtcagactggcgactcagagtcagtccccgacccacaacctctcggagaacctccagcaacccccgctgctgtgggacctactacaatggcttcaggcggtggcgcaccaatggcagacaataacgaaggcgccgacggagtgggtaatgcctcaggaaattggcattgcgattccacatggctgggcgacagagtcatcaccaccagcacccgcacctgggccttgcccacctacaataaccacctctacaagcaaatctccagtgcttcaacgggggccagcaacgacaaccactacttcggctacagcaccccctgggggtattttgacttcaacagattccactgccacttttcaccacgtgactggcaaagactcatcaacaacaattggggattccggcccaagagactcaacttcaagctcttcaacatccaagtcaaggaggtcacgacgaatgatggcgtcacgaccatcgctaataaccttaccagcacggttcaagtcttctcggactcggagtaccagttgccgtacgtcctcggctctgcgcaccagggctgcctccctccgttcccggcggacgtgttcatgattccgcaatacggctacctgacgctcaacaatggcagccaggcagtgggacggtcatccttttactgcctggaatatttcccatcgcagatgctgagaacgggcaataactttaccttcagctacacttttgaggacgttcctttccacagcagctacgctcacagccagagcctggaccggctgatgaatcctctcatcgaccagtacctgtattacctgaacagaactcagaatcagtccggaagtgcccaaaacaaggacttgctgtttagccgtgggtctccaactggcatgtctgttcagcccaaaaactggctacctggaccctgttatcggcagcagcgcgtttctaaaacaaaaacagacaacaacaacagcaactttacctggactggtgcttcaaaatataaccttaatgggcgtgaatctataatcaaccctggcactgctatggcctcacacaaagacgacgaagacaagttctttcccatgagcggtgtcatgatttttggaaaggagagcgccggagcttcaaacactgcattggacaatgtcatgatcacagacgaagaggaaatcaaagccactaaccccgtggccactgaaagatttgggactgtggcagtcaatctccagagcagcagcacagaccctgcgaccggagatgtgcatgccatgggagccttacctggaatggtgtggcaagacagagacgtatacctgcagggtcctatttgggccaaaattcctcacacggatggacactttcacccgtctcctctcatgggcggctttggacttaagcacccgcctcctcagatcctcatcaaaaacacgcctgttcctgcgaatcctccggcagagttttcggctacaaagtttgcttcattcatcacccagtattccacaggacaagtgagcgtggagattgaatgggagctgcagaaagaaaacagcaaacgctggaatcccgaagtgcagtatacatctaactatgcaaaatctgccaacgttgatttcactgtggacaacaatggactttatactgagcctcgccccattggcacccgttacctcacccgtcccctgtaa

SEQ ID NO: 568 - protein, 736 aa, synthetic construct
  REGION 1..736: note = source = /note="Description of Artificial Sequence: Synthetic polypeptide"
MAADGYLPDWLEDNLSEGIREWWDLKPGAPKPKVNQQKQDNARGLVLPGYKYLGPFNGLDKGEPVNAADAAALEHDKAYDQQLKAGDNPYLRYNHADAEFQERLQEDTSFGGNLGRAVFQAKKRVLEPFGLVEEGAKTAPGKKRPVEQSPQEPDSSSGIGKTGQQPAKKRLNFGQTGDSESVPDPQPLGEPPATPAAVGPTTMASGGGAPMADNNEGADGVGNASGNWHCDSTWLGDRVITTSTRTWALPTYNNHLYKQISSASTGASNDNHYFGYSTPWGYFDFNRFHCHFSPRDWQRLINNNWGFRPKRLNFKLFNIQVKEVTTNDGVTTIANNLTSTVQVFSDSEYQLPYVLGSAHQGCLPPFPADVFMIPQYGYLTLNNGSQAVGRSSFYCLEYFPSQMLRTGNNFTFSYTFEDVPFHSSYAHSQSLDRLMNPLIDQYLYYLNRTQNQSGSAQNKDLLFSRGSPTGMSVQPKNWLPGPCYRQQRVSKTKTDNNNSNFTWTGASKYNLNGRESIINPGTAMASHKDDEDKFFPMSGVMIFGKESAGASNTALDNVMITDEEEIKATNPVATERFGTVAVNLQSSSTDPATGDVHAMGALPGMVWQDRDVYLQGPIWAKIPHTDGHFHPSPLMGGFGLKHPPPQILIKNTPVPANPPAEFSATKFASFITQYSTGQVSVEIEWELQKENSKRWNPEVQYTSNYAKSANVDFTVDNNGLYTEPRPIGTRYLTRPL

SEQ ID NO: 569 - DNA, 2208 bp, synthetic construct
  misc_difference 955: note = modified_base - a, c, t, or g
  misc_difference 971..972: note = modified_base - a, c, t, or g
  misc_difference 981: note = modified_base - a, c, t, or g
  misc_difference 986: note = modified_base - a, c, t, or g
  misc_difference 1235: note = modified_base - a, c, t, or g
  misc_difference 1694..1696: note = modified_base - a, c, t, or g
  misc_difference 1698: note = modified_base - a, c, t, or g
  misc_difference 1763..1765: note = modified_base - a, c, t, or g
  misc_difference 1778: note = modified_base - a, c, t, or g
  misc_difference 2204: note = modified_base - a, c, t, or g
  misc_feature 1..2208: note = source = /note="Description of Artificial Sequence: Synthetic polynucleotide"
  source 1..2208: mol_type = other DNA
atggctgccgatggttatcttccagattggctcgaggacaacctctctgagggcattcgcgaatggtgggacttgaaacctggagccccgaaacccaaagtcaaccagcaaaagcaggacaacgctcggggtcttgtgcttccgggttacaaatacctcggacccttcaacggactcgacaagggggagcccgtcaacgcggcggacgcagcggccctcgagcacgacaaggcctacgaccagcagctcaaagcgggtgacaatccgtaccttcggtataaccacgccgacgccgagtttcaggagcgtctgcaagaagatacgtcttttgggggcaaccttggacgagcagtcttccaggccaagaagagggttctcgaaccttttggtctggttgaggaaggtgctaagacggctcctggaaagaaacgtccggtagagcagtcgccacaagagccagactcctcctcgggcattggcaagacaggccagcagcccgctaaaaagagactcaattttggtcagactggcgactcagagtcagtccccgacccacaacctctcggagaacctccagcaacccccgctgctgtgggacctactacaatggcttcaggcggtggcgcaccaatggcagacaataacgaaggcgccgacggagtgggtaatgcctcaggaaattggcattgcgattccacatggctgggcgacagagtcatcaccaccagcacccgaacatgggccttgcccacctataacaaccacctctacaagcaaatctccagtgcttcaacgggggccagcaacgacaaccactacttcggctacagcaccccctgggggtattttgatttcaacagattccactgccacttttcaccacgtgactggcagcgactcatcaataacaattggggattccggcccaagagactcaacttcaaactcttcaacntccaagtcaaggaggnnacgacgaangatgncgtcacaaccatcgctaataaccttaccagcacggttcaagtcttctcggactcggagtaccagcttccgtacgtcctcggctctgcgcaccagggctgcctccctccgttcccggcggacgtgttcatgattccgcaatacggctacctgacgctcaacaatggcagccaggcagtgggacggtcatccttttactgcctggaatatttcccatcgcagatgctgagaacgggcaataactttacctncagctacacttttgaggacgttcctttccacagcagctacgctcacagccagagcctggaccggctgatgaatcctctcatcgaccagtacctgtattacctgaacagaactcagaatcagtccggaagtgcccaaaacaaggacttgctgtttagccgtgggtctccaactggcatgtctgttcagcccaaaaactggctacctggaccctgttatcggcagcagcgcgtttctaaaacaaaaacagacaacaacaacagcaactttacctggactggtgcttcaaaatataaccttaatgggcgtgaatctataatcaaccctggcactgctatggcctcacacaaagacgacgaagacaagttctttcccatgagcggtgtcatgatttttggaaaggagagcgccggagcttcaaacactgcattggacaatgtcatgatcacagacgaagagannncnaagccactaaccccgtggccactgaaagatttgggactgtggcagtcaatctccaagcagcacannnaccctgcgaccgnagatgtgcatgccatgggagccttacctggaatggtgtggcaagacagagacgtatacctgcagggtcctatttgggccaaaattcctcacacggatggacactttcacccgtctcctctcatgggcggctttggacttaagcacccgcctcctcagatcctcatcaaaaacacgcctgttcctgcgaatcctccggcagagttttcggctacaaagtttgcttcattcatcacccagtattccacaggacaagtgagcgtggagattgaatgggagctgcagaaagaaaacagcaaacgctggaatcccgaagtgcagtatacatctaactatgcaaaatctgccaacgttgatttcactgtggacaacaatggactttatactgagcctcgccccattggcacccgttacctcacccgtccccngtaa

SEQ ID NO: 570 - protein, 723 aa, synthetic construct
  REGION 1..723: note = source = /note="Description of Artificial Sequence: Synthetic polypeptide"
MAADGYLPDWLEDNLSEGIREWWDLKPGAPKPKVNQQKQDNARGLVLPGYKYLGPFNGLDKGEPVNAADAAALEHDKAYDQQLKAGDNPYLRYNHADAEFQERLQEDTSFGGNLGRAVFQAKKRVLEPFGLVEEGAKTAPGKKRPVEQSPQEPDSSSGIGKTGQQPAKKRLNFGQTGDSESVPDPQPLGEPPATPAAVGPTTMASGGGAPMADNNEGADGVGNASGNWHCDSTWLGDRVITTSTRTWALPTYNNHLYKQISSASTGASNDNHYFGYSTPWGYFDFNRFHCHFSPRDWQRLINNNWGFRPKRLNFKLFNQVKETTDVTTIANNLTSTVQVFSDSEYQLPYVLGSAHQGCLPPFPADVFMIPQYGYLTLNNGSQAVGRSSFYCLEYFPSQMLRTGNNFTSYTFEDVPFHSSYAHSQSLDRLMNPLIDQYLYYLNRTQNQSGSAQNKDLLFSRGSPTGMSVQPKNWLPGPCYRQQRVSKTKTDNNNSNFTWTGASKYNLNGRESIINPGTAMASHKDDEDKFFPMSGVMIFGKESAGASNTALDNVMITDEEATNPVATERFGTVAVNLQSSPATDVHAMGALPGMVWQDRDVYLQGPIWAKIPHTDGHFHPSPLMGGFGLKHPPPQILIKNTPVPANPPAEFSATKFASFITQYSTGQVSVEIEWELQKENSKRWNPEVQYTSNYAKSANVDFTVDNNGLYTEPRPIGTRYLTRP

SEQ ID NO: 571 - DNA, 2208 bp, synthetic construct
  misc_feature 1..2208: note = source = /note="Description of Artificial Sequence: Synthetic polynucleotide"
  source 1..2208: mol_type = other DNA
atggctgccgatggttatcttccagattggctcgaggacactctctctgaaggaataagacagtggtggaagctcaaacctggcccaccaccaccaaagcccgcagagcggcataaggacgacagcaggggtcttgtgcttcctgggtacaagtacctcggacccttcaacggactcgacaagggagagccggtcaacgaggcagacgccgcggccctcgagcacgacaaagcctatgaccggcagctcgacagcggagacaacccgtacctcaagtacaaccacgccgacgcggagtttcaggagcgccttaaagaagatacgtcttttgggggcaacctcggacgagcagtcttccaggcgaaaaagagggttcttgaacctctgggcctggttgaggaacctgttaagacggctccgggaaaaaagaggccggtagagcactctcctgtggagccagactcctcctcgggaaccggaaaggcgggtcagcagcctgcaagaaaaagattgaattttggtcagactggagacgcagactcagtacctgacccccagcctctcggacagccaccagcagccccctctggtctgggaactaatacgatggctacaggcagtggcgcaccaatggcagacaataacgagggcgccgacggagtgggtaattcctcgggaaattggcattgcgattccacatggatgggcgacagagtcatcaccaccagcacccgaacctgggccctgcccacctacaacaaccacctctacaaacaaatttccagccaatcaggagcctcgaacgacaatcactactttggctacagcaccccttgggggtattttgacttcaacagattccactgccacttttcaccacgtgactggcaaagactcatcaacaacaactggggattccgacccaagagactcaagttcaagctctttaacattcaagtcaaagaggtcacgcagaatgacggtacgacgacgattgccaataaccttaccagcacggttcaggtgtttactgactcggagtaccagctcccgtacgtcctcggctcggcgcatcaaggatgcctcccgccgttcccagcagacgtcttcatggtgccacagtatggatacctcaccctgaacaacgggagtcaggcagtaggacgctcttcattttactgcctggagtactttccttctcagatgctgcgtaccggtaacaactttaccttcagctacacttttgaggacgttcctttccacagcagctacgctcacagccagagtctggaccgtctcatgaatcctctcatcgaccagtacctgtattacttgagcagaacagacgctccaagtggaaccaccacgcagtcaaggcttcagttttctcaggccggagcgagtgacattcgggaccagtctaggaactggcttcctggaccctgttaccgccagcagcgagtatcaaagacatctgcggataacaacaacagtgaatactcgtggactggagctaccaagtaccacctcaatggcagagactctctggtgaatccgggcccggccatggcaagccacaaggacgatgaagaaaagttttttcctcagagcggggttctcatctttgggaagcaaggctcagagaaaacaagtgtggacattgaaaaggtcatgattacagacgaagaggaaatcaggacaaccaatcccgtggctacggagcagtatggttctgtatctaccaacctccagagaggcaacagacaagcagctaccgcagatgtcaacacacaaggcgttcttccaggcatggtctggcaggacagagatgtgtaccttcaggggcccatctgggcaaagattccacacacggacggacattttcacccctctcccctcatgggtggattcggacttaaacaccctcctccacagattctcatcaagaacaccccggtacctgcgaatccttcgaccaccttcagtgcggcaaagtttgcttccttcatcacacagtactccacgggacaggtcagcgtggagatcgagtgggagctgcagaaggaaaacagcaaacgctggaatcccgaagttcagtacacttccaactacaacaagtctgttaatgtggactttactgtggacactaatggcgtgtattcagagcctcgccccattggcaccagatacctgactcgtaatctgtaa

SEQ ID NO: 572 - protein, 735 aa, synthetic construct
  REGION 1..735: note = source = /note="Description of Artificial Sequence: Synthetic polypeptide"
MAADGYLPDWLEDTLSEGIRQWWKLKPGPPPPKPAERHKDDSRGLVLPGYKYLGPFNGLDKGEPVNEADAAALEHDKAYDRQLDSGDNPYLKYNHADAEFQERLKEDTSFGGNLGRAVFQAKKRVLEPLGLVEEPVKTAPGKKRPVEHSPVEPDSSSGTGKAGQQPARKRLNFGQTGDADSVPDPQPLGQPPAAPSGLGTNTMATGSGAPMADNNEGADGVGNSSGNWHCDSTWMGDRVITTSTRTWALPTYNNHLYKQISSQSGASNDNHYFGYSTPWGYFDFNRFHCHFSPRDWQRLINNNWGFRPKRLKFKLFNIQVKEVTQNDGTTTIANNLTSTVQVFTDSEYQLPYVLGSAHQGCLPPFPADVFMVPQYGYLTLNNGSQAVGRSSFYCLEYFPSQMLRTGNNFTFSYTFEDVPFHSSYAHSQSLDRLMNPLIDQYLYYLSRTDAPSGTTTQSRLQFSQAGASDIRDQSRNWLPGPCYRQQRVSKTSADNNNSEYSWTGATKYHLNGRDSLVNPGPAMASHKDDEEKFFPQSGVLIFGKQGSEKTSVDIEKVMITDEEEIRTTNPVATEQYGSVSTNLQRGNRQAATADVNTQGVLPGMVWQDRDVYLQGPIWAKIPHTDGHFHPSPLMGGFGLKHPPPQILIKNTPVPANPSTTFSAAKFASFITQYSTGQVSVEIEWELQKENSKRWNPEVQYTSNYNKSVNVDFTVDTNGVYSEPRPIGTRYLTRNL

SEQ ID NO: 573 - DNA, 2208 bp, synthetic construct
  misc_feature 1..2208: note = source = /note="Description of Artificial Sequence: Synthetic polynucleotide"
  source 1..2208: mol_type = other DNA
atggctgccgatggttatcttccagattggctcgaggacactctctctgaaggaataagacagtggtggaagctcaaacctggcccaccaccaccaaagcccgcagagcggcataaggacgacagcaggggtcttgtgcttcctgggtacaagtacctcggacccttcaacggactcgacaagggagagccggtcaacgaggcagacgccgcggccctcgagcacgacaaagcctatgaccggcagctcgacagcggagacaacccgtacctcaagtacaaccacgccgacgcggagtttcaggagcgccttaaagaagatacgtcttttgggggcaacctcggacgagcagtcttccaggcgaaaaagagggttcttgaacctctgggcctggttgaggaacctgttaagacggctccgggaaaaaagaggccggtagagcactctcctgtggagccagactcctcctcgggaaccggaaaggcgggccagcagcctgcaagaaaaagattgaattttggtcagactggagacgcaaactcagtacctgacccccagcctctcggacagccaccagcagccccctctggtctgggaactaatacgatggctacaggcagtggcgcaccaatggcagacaataacgagggcgccgacggagtgggtaattcctcgggaaattggcattgcgattccacatggatgggcgacagagtcatcaccaccagcacccgaacctgggccctgcccacctacaacaaccacctctacaaacaaatttccagccaatcaggagcctcgaacgacaatcactactttggctacagcaccccttgggggtattttgacttcaacagattccactgccacttttcaccacgtgactggcaaagactcatcaacaacaactggggattccgacccaagagactcaagttcaagctctttaacattcaagtcaaagaggtcacgcagaatgacggtacgacgacgattgccaataaccttaccagcacggttcaggtgtttactgactcggagtaccagctcccgtacgtcctcggctcggcgcatcaaggatgcctcccgccgttcccagcagacgtcttcatggtgccacagtatggatacctcaccctgaacaacgggagtcgggcagtaggacgctcttcattttactgcctggagtactttccttctcagatgctgcgtaccggtaacaactttaccttcagctacacttttgaggacgttcctttccacagcagctacgctcacagccagagtctggaccgtctcatgaatcctctcatcgaccagtacctgtattacttgagcagaacagacactccaagtggaaccaccacgcagtcaaggcttcagttttctcaggccggagcgagtgacattcgggaccagtctaggaactggcttcctggaccctgttaccgccagcagcgagtatcaaagacatctgcggataacaacaacagtgaatactcgtggactggagctaccaagtaccacctcaatggcagagactctctggtgaatccgggcccggccatggcaagccacaaggacgatgaagaaaagttttttcctcagagcggggttctcatctttgggaagcaaggctcagagaaaacaagtgtggacattgaaaaggtcatgattacagacgaagaggaaatcaggacgaccaatcccgtggctacggagcagtatggttctgtatctaccaacctccagagaggcaacagacaagcagctaccgcagatgtcaacacacaaggcgttcttccaggcatggtctggcaggacagagatgtgtaccttcaggggcccatctgggcaaagattccacacacggacggacattttcacccctctcccctcatgggtggattcggacttaaacaccctcctccacagattctcatcaagaacaccccggtacctgcgaatccttcgaccaccttcagtgcggcaaagtttgcttccttcatcacacagtactccacgggacaggtcagcgtggagatcgagtgggagctgcagaaggaaaacagcaaacgctggaatcccgaagttcagtacacttccaactacaacaagtctgttaatgtggactttactgtggacactaatggcgtgtatacagagcctcgccccattggcaccagatacctgactcgtaatctgtaa

SEQ ID NO: 574 - protein, 735 aa, synthetic construct
  REGION 1..735: note = source = /note="Description of Artificial Sequence: Synthetic polypeptide"
MAADGYLPDWLEDTLSEGIRQWWKLKPGPPPPKPAERHKDDSRGLVLPGYKYLGPFNGLDKGEPVNEADAAALEHDKAYDRQLDSGDNPYLKYNHADAEFQERLKEDTSFGGNLGRAVFQAKKRVLEPLGLVEEPVKTAPGKKRPVEHSPVEPDSSSGTGKAGQQPARKRLNFGQTGDANSVPDPQPLGQPPAAPSGLGTNTMATGSGAPMADNNEGADGVGNSSGNWHCDSTWMGDRVITTSTRTWALPTYNNHLYKQISSQSGASNDNHYFGYSTPWGYFDFNRFHCHFSPRDWQRLINNNWGFRPKRLKFKLFNIQVKEVTQNDGTTTIANNLTSTVQVFTDSEYQLPYVLGSAHQGCLPPFPADVFMVPQYGYLTLNNGSRAVGRSSFYCLEYFPSQMLRTGNNFTFSYTFEDVPFHSSYAHSQSLDRLMNPLIDQYLYYLSRTDTPSGTTTQSRLQFSQAGASDIRDQSRNWLPGPCYRQQRVSKTSADNNNSEYSWTGATKYHLNGRDSLVNPGPAMASHKDDEEKFFPQSGVLIFGKQGSEKTSVDIEKVMITDEEEIRTTNPVATEQYGSVSTNLQRGNRQAATADVNTQGVLPGMVWQDRDVYLQGPIWAKIPHTDGHFHPSPLMGGFGLKHPPPQILIKNTPVPANPSTTFSAAKFASFITQYSTGQVSVEIEWELQKENSKRWNPEVQYTSNYNKSVNVDFTVDTNGVYTEPRPIGTRYLTRNL

SEQ ID NO: 575 - DNA, 2211 bp, synthetic construct
  misc_feature 1..2211: note = source = /note="Description of Artificial Sequence: Synthetic polynucleotide"
  source 1..2211: mol_type = other DNA
atggctgccgatggttatcttccagattggctcgaggacactctctctgaaggaataagacagtggtggaagctcaaacctggcccaccaccaccaaagcccgcagagcggcataaggacgacagcaggggtcttgtgcttcctgggtacaagtacctcggacccttcaacggactcgacaagggagagccggtcaacgaggcagacgccgcggccctcgagcacgacaaggcctacgaccagcagctcaaagcgggtgacaatccgtacctgcggtataaccacgccgacgccgagtttcaggagcgtctgcaagaagatacgtcttttgggggcaacctcgggcgagcagtcttccaggccaagaagcgggttctcgaacctctcggtctggttgaggaaggcgctaagacggctcctggaaagaaacgtccggtagagcagtcgccacaagagccagactcctcctcgggcatcggcaagacaggccagcagcccgctaaaaagagactcaattttggtcagactggcgactcagagtcagtccccgacccacaacctctcggagaacctccagcaacccccgctgctgtgggacctactacaatggcttcaggcggtggcgcaccaatggcagacaataacgaaggcgccgacggagtgggtaatgcctcaggaaattggcattgcgattccacatggctgggcgacagagtcatcaccaccagcacccgaacatgggccttgcccacctataacaaccacctctacaagcaaatctccagtgcttcgacgggggccagcaacgacaaccactacttcggctacagcaccccctgggggtattttgactttaacagattccactgccacttttcaccacgtgactggcagcgactcatcaacaataactggggattccggcccaagagactcagcttcaagctcttcaacatccaggtcaaggaggtcacgacgaatgatggcgtcacaaccatcgctaataaccttaccagcacggttcaagtcttctcggactcggagtaccagcttccgtacgtcctcggctctgcgcaccagggctgcctccctccgttcccggcggacgtgttcatgattccgcaatacggctacctgacgctcaacaatggcagccaagccgtgggacgttcatccttttactgcctggaatatttcccttctcagatgctgagaacgggcaacaactttaccttcagctacacctttgaggaagtgcctttccacagcagctacgcgcacagccagagcctggaccggctgatgaatcctctcatcgatcaatacctgtattacctgaacagaactcaaaatcagtccggaagtgcccaaaacaaggacttgctgtttagccgtgggtctccagctggcatgtctgttcagcccaaaaactggctacctggaccctgttatcggcagcagcgcgtttctaaaacaaaaacagacaacaacaacagcaattttacctggactggtgcttcaaaatataacctcaatgggcgtgaatccatcatcaaccctggcactgctatggcctcacacaaagacgacgaagacaagttctttcccatgagcggtgtcatgatttttggaaaagagagcgccggagcttcaaacactgcattggacaatgtcatgattacggacgaagaggaaattaaagccactaaccctgtggccaccgaaagatttgggaccgtggcagtcaatttccagagcagcagcacagaccctgcgaccggagatgtgcatgctatgggagcattacctggcatggtgtggcaagatagagacgtgtacctgcagggtcccatttgggccaaaattcctcacacagatggacactttcacccgtctcctcttatgggcggctttggactcaagaacccgcctcctcagatcctcatcaaaaacacgcctgttcctgcgaatcctccggcggagttttcagctacaaagtttgcttcattcatcactcaatactccacaggacaagtgagcgtggaaattgaatgggagctgcagaaagaaaacagcaaacgctggaatcccgaagtgcagtatacatctaactatgcaaaatctgccaacgttgatttcactgtggacaacaatggactttatactgagcctcgccccattggcacccgttacctcacccgtcccctgtaa

SEQ ID NO: 576 - protein, 736 aa, synthetic construct
  REGION 1..736: note = source = /note="Description of Artificial Sequence: Synthetic polypeptide"
MAADGYLPDWLEDTLSEGIRQWWKLKPGPPPPKPAERHKDDSRGLVLPGYKYLGPFNGLDKGEPVNEADAAALEHDKAYDQQLKAGDNPYLRYNHADAEFQERLQEDTSFGGNLGRAVFQAKKRVLEPLGLVEEGAKTAPGKKRPVEQSPQEPDSSSGIGKTGQQPAKKRLNFGQTGDSESVPDPQPLGEPPATPAAVGPTTMASGGGAPMADNNEGADGVGNASGNWHCDSTWLGDRVITTSTRTWALPTYNNHLYKQISSASTGASNDNHYFGYSTPWGYFDFNRFHCHFSPRDWQRLINNNWGFRPKRLSFKLFNIQVKEVTTNDGVTTIANNLTSTVQVFSDSEYQLPYVLGSAHQGCLPPFPADVFMIPQYGYLTLNNGSQAVGRSSFYCLEYFPSQMLRTGNNFTFSYTFEEVPFHSSYAHSQSLDRLMNPLIDQYLYYLNRTQNQSGSAQNKDLLFSRGSPAGMSVQPKNWLPGPCYRQQRVSKTKTDNNNSNFTWTGASKYNLNGRESIINPGTAMASHKDDEDKFFPMSGVMIFGKESAGASNTALDNVMITDEEEIKATNPVATERFGTVAVNFQSSSTDPATGDVHAMGALPGMVWQDRDVYLQGPIWAKIPHTDGHFHPSPLMGGFGLKNPPPQILIKNTPVPANPPAEFSATKFASFITQYSTGQVSVEIEWELQKENSKRWNPEVQYTSNYAKSANVDFTVDNNGLYTEPRPIGTRYLTRPL

SEQ ID NO: 577 - protein, 735 aa, synthetic construct
  REGION 1..735: note = source = /note="Description of Artificial Sequence: Synthetic polypeptide"
MAADGYLPDWLEDTLSEGIRQWWKLKPGPPPPKPAERHKDDSRGLVLPGYKYLGPFNGLDKGEPVNEADAAALEHDKAYDRQLDSGDNPYLKYNHADAEFQERLKEDTSFGGNLGRAVFQAKKRVLEPLGLVEEPVKTAPGKKRPVEHSPVEPDSSSGTGKAGQQPARKRLNFGQTGDADSVPDPQPLGQPPAAPSGLGTNTMATGSGAPMADNNEGADGVGNSSGNWHCDSTWMGDRVITTSTRTWALPTYNNHLYKQISSQSGASNDNHYFGYSTPWGYFDFNRFHCHFSPRDWQRLINNNWGFRPKRLKFKLFNIQVKEVTQNDGTTTIANNLTSTVQVFTDSEYQLPYVLGSAHQGCLPPFPADVFMVPQYGYLTLNNGSQAVGRSSFYCLEYFPSQMLRTGNNFTFSYTFEDVPFHSSYAHSQSLDRLMNPLIDQYLYYLSRTDTPSGTTTQSRLQFSQAGASDIRNQSRNWLPGPCYRQQRVSKTSADNNNSEYSWTGATKYHLNGRDSLVNPGPAMASHKDDEEKFFPQSGVLIFGKQGSEKTSVDIEKVMITDEEEIRTTNPVATEQYGSVSTNLQRGNRQAATADVNTQGVLPGMVWQDRDVYLQGPIWAKIPHTDGHFHPSPLMGGFGLKHPPPQILIKNTPVPANPSTTFSAAKFASFITQYSTGQVSVEIEWELQKENSKRWNPEVQYTSNYNKSVNVDFTVDTNGVYSEPRPIGTRYLTRNQ

SEQ ID NO: 578 - DNA, 2208 bp, synthetic construct
  misc_feature 1..2208: note = source = /note="Description of Artificial Sequence: Synthetic polynucleotide"
  source 1..2208: mol_type = other DNA
atggctgccgatggttatcttccagattggctcgaggacactctctctgaaggaataagacagtggtggaagctcaaacctggcccaccaccaccaaagcccgcagagcggcataaggacgacagcaggggtcttgtgcttcctgggtacaagtacctcggacccttcaacggactcgacaagggagagccggtcaacgaggcagacgccgcggccctcgagcacgacaaagcctatgaccggcagctcgacagcggagacaacccgtacctcaagtacaaccacgccgacgcggagtttcaggaacgccttaaagaagatacgtcttttgggggcaacctcggacgagcagtcttccaggcgaaaaagagggttcttgaacctctgggcctggttgaggaacctgttaagacggctccgggaaaaaagaggccggtagagcactctcctgtggagccagactcctcctcgggaaccggaaaggcgggccagcagcctgcaagaaaaagattgaattttggtcagactggagacgcagactcagtacctgacccccagcctctcggacagccaccagcagccccctctggtctgggaactaatacgatggctacaggcagtggcgcaccaatggcagacaataacgagggcgccgacggagtgggtaattcctcgggaaattggcattgcgattccacatggatgggcgacagagtcatcaccaccagcacccgaacctgggccctgcccacctacaacaaccacctctacaaacaaatttccagccaatcaggagcctcgaacgacaatcactactttggctacagcaccccttgggggtattttgacttcaacagattccactgccacttttcaccacgtgactggcaaagactcatcaacaacaactggggattccgacccaagagactcaagttcaagctctttaacattcaagtcaaagaggtcacgcagaatgacggtacgacgacgattgccaataaccttaccagcacggttcaggtgtttactgactcggagtaccagctcccgtacgtcctcggctcggcgcatcaaggatgcctcccgccgttcccagcagacgtcttcatggtgccacagtatggatacctcaccctgaacaacgggagtcaggcagtaggacgctcttcattttactgcctggagtactttccttctcagatgctgcgtaccggtaacaactttaccttcagctacacttttgaggacgttcctttccacagcagctacgctcacagccagagtctggaccgtctcatgaatcctctcatcgaccagtacctgtattacttgagcagaacagacactccaagtggaaccaccacgcagtcaaggcttcagttttctcaggccggagcgagtgacattcggaaccagtctaggaactggcttcctggaccctgttaccgccagcagcgagtatcaaagacatctgcggataacaacaacagtgaatactcgtggactggagctaccaagtaccacctcaatggcagagactctctggtgaatccgggcccggccatggcaagccacaaggacgatgaagaaaagttttttcctcagagcggggttctcatctttgggaagcaaggctcagagaaaacaagtgtggacattgaaaaggtcatgattacagacgaagaggaaatcaggacaaccaatcccgtggctacggagcagtatggttctgtatctaccaacctccagagaggcaacagacaagcagctaccgcagatgtcaacacacaaggcgttcttccaggcatggtctggcaggacagagatgtgtaccttcaggggcccatctgggcaaagattccacacacggacggacattttcacccctctcccctcatgggtggattcggacttaaacaccctcctccacagattctcatcaagaacaccccggtacctgcgaatccttcgaccaccttcagtgcggcaaagtttgcttccttcatcacacagtactccacgggacaggtcagcgtggagatcgagtgggagctgcagaaggaaaacagcaaacgctggaatcccgaagttcagtacacttccaactacaacaagtctgttaatgtggactttactgtggacactaatggcgtgtattcagagcctcgccccattggcaccagatacctgactcgtaatcagtaa

SEQ ID NO: 579 - DNA, 2208 bp, synthetic construct
  misc_feature 1..2208: note = source = /note="Description of Artificial Sequence: Synthetic polynucleotide"
  source 1..2208: mol_type = other DNA
atggctgccgatggttatcttccagattggctcgaggacactctctctgaaggaataagacagtggtggaagctcaaacctggcccaccaccaccaaagcccgcagagcggcataaggacgacagcaggggtcttgtgcttcctgggtacaagtacctcggacccttcaacggactcgacaagggagagccggtcaacgaggcagacgccgcggccctcgagcacgacaaagcctatgaccggcagctcgacagcggagacaacccgtacctcaagtacaaccacgccgacgcggagtttcaggagcgccttaaagaagatacgtcttttgggggcaacctcggacgagcagtcttccaggcgaaaaagagggttcttgaacctctgggcctggttgaggaacctgttaagacggctccgggaaaaaagaggccggtagagcactctcctgtggagccagactcctcctcgggaaccggaaaggcgggccagcagcctgcaagaaaaagattgaattttggtcagactggagacgcagactcagtacctgatccccagcctctcggacagccaccagcagccccctctggtctgggaactaatacgatggctacaggcagtggcgcaccaatggcagacaataacgagggcgccgacggagtgggtaattcctcgggaaattggcattgcgattccacatggatgggcgacagagtcatcaccaccagcacccgaacctgggccctgcccacctacaacaaccacctctacaaacaaatttccagccaatcaggagcctcgaacgacaatcactactttggctacagcaccccttgggggtattttgacttcaacagattccactgccacttttcaccacgtgactggcaaagactcatcaacaacaactggggattccgacccaagagactcaagttcaagctctttaacattcaagtcaaagaggtcacgcagaatgacggtacgacgacgattgccaataaccttaccagcacggttcaggtgtttactgactcggagtaccagctcccgtatgtcctcggctcggcgcatcaaggatgcctcccgccgttcccagcagacgtcttcatggtgccacagtatggatacctcaccctgaacaacgggagtcaggcagtaggacgctcttcattttactgcctggagtactttccttctcagatgctgcgtaccggtaacaactttaccttcagctacacttttgaggacgttcctttccacagcagctacgctcacagccagagtctggaccgtctcatgaatcctctcatcgaccagtacctgtattacttgagcagaacagacactccaagtggaaccaccacgcagtcaaggcttcagttttctcaggccggagcgagtgacattcgggaccagtctaggaactggcttcctggaccctgttaccgccagcagcgagtatcaaagacatctgcggataacaacaacagtgaatactcgtggactggagctaccaagtaccacctcaatggcagagactctctggtgaatccgggcccggccatggcaagccacaaggacgatgaagaaaagttttttcctcagagcggggttctcatctttgggaagcaaggctcagagaaaacaagtgtggacattgaaaaggtcatgattacagacgaagaggaaatcaggacaaccaatcccgtggctacggagcagtatggttctgtatctaccaacctccagagaggcaacagacaagcagctaccgcagatgtcaacacacaaggcgttcttccaggcatggtctggcaggacagagatgtgtaccttcaggggcccatctgggcaaagattccacacacggacggacattttcacccctctcccctcatgggtggattcggacttaaacaccctcctccacagattctcatcaagaacaccccggtacctgcgaatccttcgaccaccttcagtgcggcaaagtttgcttccttcatcacacagtactccacgggacaggtcagcgtggagatcgagtgggagctgcagaaggaaaacagcaaacgctggaatcccgaagttcagtacacttccaactacaacaagtctgttaatgtggactttactgtggacactaatggcgtgtattcagagcctcgccccattggcaccagatacctgactcgtaatctgtaa

SEQ ID NO: 580 - protein, 735 aa, synthetic construct
  REGION 1..735: note = source = /note="Description of Artificial Sequence: Synthetic polypeptide"
MAADGYLPDWLEDTLSEGIRQWWKLKPGPPPPKPAERHKDDSRGLVLPGYKYLGPFNGLDKGEPVNEADAAALEHDKAYDRQLDSGDNPYLKYNHADAEFQERLKEDTSFGGNLGRAVFQAKKRVLEPLGLVEEPVKTAPGKKRPVEHSPVEPDSSSGTGKAGQQPARKRLNFGQTGDADSVPDPQPLGQPPAAPSGLGTNTMATGSGAPMADNNEGADGVGNSSGNWHCDSTWMGDRVITTSTRTWALPTYNNHLYKQISSQSGASNDNHYFGYSTPWGYFDFNRFHCHFSPRDWQRLINNNWGFRPKRLKFKLFNIQVKEVTQNDGTTTIANNLTSTVQVFTDSEYQLPYVLGSAHQGCLPPFPADVFMVPQYGYLTLNNGSQAVGRSSFYCLEYFPSQMLRTGNNFTFSYTFEDVPFHSSYAHSQSLDRLMNPLIDQYLYYLSRTDTPSGTTTQSRLQFSQAGASDIRDQSRNWLPGPCYRQQRVSKTSADNNNSEYSWTGATKYHLNGRDSLVNPGPAMASHKDDEEKFFPQSGVLIFGKQGSEKTSVDIEKVMITDEEEIRTTNPVATEQYGSVSTNLQRGNRQAATADVNTQGVLPGMVWQDRDVYLQGPIWAKIPHTDGHFHPSPLMGGFGLKHPPPQILIKNTPVPANPSTTFSAAKFASFITQYSTGQVSVEIEWELQKENSKRWNPEVQYTSNYNKSVNVDFTVDTNGVYSEPRPIGTRYLTRNL

SEQ ID NO: 581 - DNA, 2601 bp, synthetic construct
  misc_feature 1..2601: note = source = /note="Description of Artificial Sequence: Synthetic polynucleotide"
  source 1..2601: mol_type = other DNA
ccatcgacgtcagacgcggaagcttcgatcaactacgcggacaggtaccaaaacaaatgttctcgtcacgtgggcatgaatctgatgctgtttccctgcagacaatgcgagagactgaatcagaattcaaatatctgcttcactcacggtgtcaaagactgtttagagtgctttcccgtgtcagaatctcaacccgtttctgtcgtcaaaaaggcgtatcagaaactgtgctacattcatcacatcatgggaaaggtgccagacgcttgcactgcttgcgacctggtcaatgtggacttggatgactgtgtttctgaacaataaatgacttaaaccaggtatgactgccgatggttatcttccagattggctcgaggacaaccttagtgaaggaattcgcgagtggtgggctttgaaacctggagcccctcaacccaaggcaaatcaacaacatcaagacaacgctcgaggtcttgtgcttccgggttacaaataccttggacccggcaacggactcgacaagggggagccggtcaacgcagcagacgcggcggccctcgagcacgacaaggcctacgaccagcagctcaaggccggagacaacccgtacctcaagtacaaccacgccgacgccgagttccaggagcggctcaaagaagatacgtcttttgggggcaacctcgggcgagcagtcttccaggccaaaaagaggcttcttgaacctcttggtctggttgaggaagcggctaagacggctcctggaaagaagaggcctgtagagcagtctcctcaggaaccggactcctccgcgggtattggcaaatcgggtgcacagcccgctaaaaagagactcaatttcggtcagactggcgacacagagtcagtcccagaccctcaaccaatcggagaacctcccgcagccccctcaggtgtgggatctcttacaatggcttcaggtggtggcgcaccagtggcagacaataacgaaggtgccgatggagtgggtagttcctcgggaaattggcattgcgattcccaatggctgggggacagagtcatcaccaccagcacccgaacctgggccctgcccacctacaacaatcacctctacaagcaaatctccaacagcacatctggaggatcttcaaatgacaacgcctacttcggctacagcaccccctgggggtattttgacttcaacagattccactgccacttctcaccacgtgactggcagcgactcatcaacaacaactggggattccggcctaagcaactcaacttcaagctcttcaacattcaggtcaaagaggttacggacaacaatggagtcaagaccatcgccaataaccttaccagcacggtccaggtcttcacggactcagactatcagctcccgtacgtgctcgggtcggctcacgagggctgcctcccgccgttcccagcggacgttttcatgattcctcagtacgggtatctgacgcttaatgatggaagccaggccgtgggtcgttcgtccttttactgcctggaatatttcccgtcgcaaatgctaagaacgggtaacaacttccagttcagctacgagtttgagaacgtacctttccatagcagctacgctcacagccaaagcctggaccgactaatgaatccactcatcgaccaatacttgtactatctctcaaagactattaacggttctggacagaatcaacaaacgctaaaattcagtgtggccggacccagcaacatggctgtccagggaagaaactacatacctggacccagctaccgacaacaacgtgtctcaaccactgtgactcaaaacaacaacagcgaatttgcttggcctggagcttcttcttgggctctcaatggacgtaatagcttgatgaatcctggacctgctatggccagccacaaagaaggagaggaccgtttctttcctttgtctggatctttaatttttggcaaacaaggaactggaagagacaacgtggatgcggacaaagtcatgataaccaacgaagaagaaattaaaactactaacccggtagcaacggagtcctatggacaagtggccacaaaccaccagagtgcccaagcacaggcgcagaccggctgggttcaaaaccaaggaatacttccgggtatggtttggcaggacagagatgtgtacctgcaaggacccatttgggccaaaattcctcacacggacggcaactttcacccttctccgctgatgggagggtttggaatgaagcacccgcctcctcagatcctcatcaaaaacacacctgtacctgcggatcctccaacggccttcaacaaggacaagctgaactctttcatcacccagtattctactggccaagtcagcgtggagatcgagtgggagctgcagaaggaaaacagcaagcgctggaacccggagatccagtacacttccaactattacaagtctaataatgttgaatttgctgttaatactgaaggtgtatatagtgaaccccgccccattggcaccagatacctgactcgtaatctgtaattgcttgttaatcaataaaccgtttaattcgtttcagttgaactgcggcc

SEQ ID NO: 582 - DNA, 2601 bp, synthetic construct
  misc_feature 1..2601: note = source = /note="Description of Artificial Sequence: Synthetic polynucleotide"
  source 1..2601: mol_type = other DNA
ccatcgacgtcagacgcggaagcttcgatcaactacgcggacaggtaccaaaacaaatgttctcgtcacgtgggcatgaatctgatgctgtttccctgcagacaatgcgagagactgaatcagaattcaaatatctgcttcactcacggtgtcaaagactgtttagagtgctttcccgtgtcagaatctcaacccgtttctgtcgtcaaaaaggcgtatcagaaactgtgctacattcatcacatcatgggaaaggtgccagacgcttgcactgcttgcgacctggtcaatgtggacttggatgactgtgtttctgaacaataaatgacttaaaccaggtatggctgccgatggttatcttccagattggctcgaggacaaccttagtgaaggaattcgcgagtggtgggctttgaaacctggagcccctcaacccaaggcaaatcaacaacatcaagacaacgctcgaggtcttgtgcttccgggttacaaataccttggacccggcaacggactcgacaagggggagccggtcaacgcagcagacgcggcggccctcgagcacgacaaggcctacgaccagcagctcaaggccggagacaacccgtacctcaagtacaaccacgccgacgccgagttccaggagcggctcaaagaagatacgtcttttgggggcaacctcgggcgagcagtcttccaggccaaaaagaggcttcttgaacctcttggtctggttgaggaagcggctaagacggctcctggaaagaagaggcctgtagagcagtctcctcaggaaccggactcctccgcgggtattggcaaatcgggtgcacagcccgctaaaaagagactcaatttcggtcagactggcgacacagagtcagtcccagaccctcaaccaatcggagaacctcccgcagccccctcaggtgtgggatctcttacaatggcttcaggtggtggcgcaccagtggcagacaataacgaaggtgccgatggagtgggtagttcctcgggaaattggcattgcgattcccaatggctgggggacagagtcatcaccaccagcacccgaacctgggccctgcccacctacaacaatcacctctacaagcaaatctccaacagcacatctggaggatcttcaaatgacaacgcctacttcggctacagcaccccctgggggtattttgacttcaacagattccactgccacttctcaccacgtgactggcagcgactcatcaacaacaactggggattccggcctaagcgactcaacttcaagctcttcaacattcaggtcaaagaggttacggacaacaatggagtcaagaccatcgccaataaccttaccagcacggtccaggtcttcacggactcagactatcagctcccgtacgtgctcgggtcggctcacgagggctgcctcccgccgttcccagcggacgttttcatgattcctcagtacgggtatctgacgcttaatgatggaagccaggccgtgggtcgttcgtccttttactgcctggaatatttcccgtcgcaaatgctaagaacgggtaacaacttccagttcagctacgagtttgagaacgtacctttccatagcagctacgctcacagccaaagcctggaccgactaatgaatccactcatcgaccaatacttgtactatctctcaaagactattaacggttctggacagaatcaacaaacgctaaaattcagtgtggccggacccagcaacatggctgtccagggaagaaactacatacctggacccagctaccgacaacaacgtgtctcaaccactgtgactcaaaacaacaacagcgaatttgcttggcctggggcttcttcttgggctctcaatggacgtaatagcttgatgaatcctggacctgctatggccagccacaaagaaggagaggaccgtttctttcctttgtctggatctttaatttttggcaaacaaggaactggaagagacaacgtggatgcggacaaagtcatgataaccaacgaagaagaaattaaaactactaacccggtagcaacggagtcctatggacaagtggccacaaaccaccagagtgcccaagcacaggcgcagaccggctgggttcaaaaccaaggaatacttccgggtatggtttggcaggacagagatgtgtacctgcaaggacccatttgggccaaaattcctcacacgggcggcaactttcacccttctccgctgatgggagggtttggaatgaagcacccgcctcctcagatcctcatcaaaaacacacctgtacctgcggatcctccaacggccttcaacaaggacaagctgaactctttcatcacccagtattctactggccaagtcagcgtggagatcgagtgggagctgcagaaggaaaacagcaagcgctggaacccggagatccagtacacttccaactattacaagtctaataatgttgaatttgctgttaatactggaggtgtatatagtgaaccccgccccattggcaccagatacctgactcgtaatctgtaattgcttgttaatcaataaaccgtttaattcgtttcagttgaactgcggcc

SEQ ID NO: 583 - DNA, 2601 bp, synthetic construct
  misc_feature 1..2601: note = source = /note="Description of Artificial Sequence: Synthetic polynucleotide"
  source 1..2601: mol_type = other DNA
ccatcgacgtcagacgcggaagcttcgatcaactacgcggacaggtaccaaaacaaatgttctcgtcacgtgggcatgaatctgatgctgtttccctgcagacaatgcgagagactgaatcagaattcaaatatctgcttcactcacggtgtcaaagactgtttagagtgctttcccgtgtcagaatctcaacccgtttctgtcgtcaaaaaggcgtatcagaaactgtgctacattcatcacatcatgggaaaggtgccagacgcttgcactgcttgcgacctggtcaatgtggactcggatgactgtgtttctgaacaataaatgacttaaaccaggtatggctgccgatggttatcttccagattggctcgaggacaaccttagtgaaggaattcgcgagtggtgggctttgaaacctggagcccctcaacccaaggcaaatcaacaacatcaagacaacgctcgaggtcttgtgcttccgggttacaaataccttggacccggcaacggactcgacaagggggagccggtcaacgcagcagacgcggcggccctcgagcacgacaaggcctacgaccagcagctcaaggccggagacaacccgtacctcaagtacaaccacgccgacgccgagttccaggagcggctcaaagaagatacgtcttttgggggcaacctcgggcgagcagtcttccaggccaaaaagaggcttcttgaacctcttggtctggttgaggaagcggctaagacggctcctggaaagaagaggcctgtagagcagtctcctcaggaaccggactcctccgcgggtattgacaaatcgggtgcacagcccgctaaaaagagactcaatttcggtcagactggcgacacagagtcagtcccagaccctcaaccaatcggagaacctcccgcagccccctcaggtgtgggatctcttacaatggcttcaggtggtggcgcaccagtggcagacaataacgaaggtgccgatggagtgggtagttcctcgggaaattggcattgcgattcccaatggctgggggacagagtcatcaccaccagcacccgaacctgggccctgcccacctacaacaatcacctctacaagcaaatctccaacagcacatctggaggatcttcaaatgacaacgcctacttcggctacagcaccccctgggggtattttgacttcaacagattccactgccacttctcaccacgtgactggcagcgactcatcaacaacaactggggattccggcctaagcgactcaacttcaagctcttcaacattcaggtcaaagaggttacggacaacaatggagtcaagaccatcgccaataaccttaccagcacggtccaggtcttcacggactcggactatcagctcccgtacgtgctcgggtcggctcacgagggctgcctcccgccgttcccagcggacgttttcatgattcctcagtacgggtatctgacgcttaatgatggaagccaggccgtgggtcgttcgtccttttactgcctggaatatttcccgtcgcaaatgctaagaacgggtaacaacttccagttcagctacgagtttgagaacgtacctttccatagcagctacgctcacagccaaagcctggaccgactaatgaatccactcatcgaccaatacttgtactatctctcaaagactattaacggttctggacagaatcaacaaacgctaaaattcagtgtggccggacccagcaacatggctgtccagggaagaaactacatacctggacccagctaccgacaacaacgtgtctcaaccactgtgactcaaaacaacaacagcgaatttgcttggcctggagcttcttcttgggctctcaatggacgtaatagcttgatgaatcctggacctgctatggccagccacaaagaaggagaggaccgtttctttcctttgtctggatctttaatttttggcaaacaaggaactggaagagacaacgtggatgcggacaaagtcatgataaccaacgaagaagaaattaaaactactaacccggtagcaacggagtcctatggacaagtggccacaaaccaccagagtgcccaagcacaggcgcagaccggctgggttcaaaaccaaggaatacttccgggtatggtttggcaggacagagatgtgtacctgcaaggacccatttgggccaaaattcctcacacggacggcaactttcacccttctccgctgatgggagggtttggaatgaagcacccgcctcctcagatcctcatcaaaaacacacctgtacctgcggatcctccaacggccttcaacaaggacaagctgaactctttcatcacccagtattctactggccaagtcagcgtggagatcgagtgggagctgcagaaggaaaacagcaagcgctggaacccggagatccagtacacttccaactattacaagtctaataatgttgaatttgctgttaatactgaaggtgtatatagtgaaccccgccccattggcaccagatacctgactcgtaatctgtaattgcttgttaatcaataaaccgtttaattcgtttcagttgaactgcggcc

SEQ ID NO: 584 - DNA, 2601 bp, synthetic construct
  misc_feature 1..2601: note = source = /note="Description of Artificial Sequence: Synthetic polynucleotide"
  source 1..2601: mol_type = other DNA
ccatcgacgtcagacgcggaagcttcgatcaactacgcggacaggtaccaaaacaaatgttctcgtcacgtgggcatgaatctgatgctgtttccctgcagacaatgcgagagactgaatcagaattcaaatatctgcttcactcacggtgtcaaagactgtttagagtgctttcccgtgtcagaatctcaacccgtttctgtcgtcaaaaaggcgtatcagaaactgtgctacattcatcacatcatgggaaaggtgccagacgcttgcactgcttgcgacctggtcaatgtggacttggatgactgtgtttctgaacaataaatgacttaaaccaggtatggctgccgatggttatcttccagattggctcgaggacaaccttagtgaaggaattcgcgagtggtgggctttgaaacctggagcccctcaacccaaggcaaatcaacaacatcaagacaacgctcgaggtcttgtgcttccgggttacaaataccttggacccggcaacggactcgacaagggggagccggtcaacgcagcagacgcggcggccctcgagcacgacaaggcctacgaccagcagctcaaggccggagacaacccgtacctcaagtacaaccacgccgacgccgagttccaggagcggctcaaagaagatacgtcttttgggggcaacctcgggcgagcagtcctccaggccaaaaagaggcttcttgaacctcttggtctggttgaggaagcggctaagacggctcctggaaagaagaggcctgtagagcagtctcctcaggaaccggactcctccgcgggtattggcaaatcgggtgcacagcccgctaaaaagagactcaatttcggtcagactggcgacacagagtcagtcccagaccctcaaccaatcggagaacctcccgcagccccctcaggtgtgggatctcttacaatggcttcaggtggtggcgcaccagtggcagacaataacgaaggtgccgatggagtgggtagttcctcgggaaattggcattgcgattcccaatggctgggggacagagtcatcaccaccagcacccgaacctgggccctgcccacctacaacaatcacctctacaagcaaatctccaacagcacatctggaggatcttcaaatgacaacgcctacttcggctacagcaccccctgggggtattttgacttcaacagattccactgccacttctcaccacgtgactggcagcgactcatcaacaacaactggggattccggcctaagcgactcaacttcaagctcttcaacattcaggtcaaagaggttacggacaacaatggagtcaagaccatcgccaataaccttaccagcacggtccaggtcttcacggactcagactatcagctcccgtacgtgctcgggtcggctcacgagggctgcctcccgccgttcccagcggacgttttcatgattcctcagtacgggtatctgacgcttaatgatggaagccaggccgtgggtcgttcgtccttttactgcctggaatatttcccgtcgcaaatgctaagaacgggtaacaacttccagttcagctacgagtttgagaacgtacctttccatagcagctacgctcacagccaaagcctggaccgactaatgaatccactcatcgaccaatacttgtactatctctcaaagactattaacggttctggacagaatcaacaaacgctaaaattcagtgtggccggatccagcaacatggctgtccagggaagaaactacatacctggacccagctaccgacaacaacgtgtctcaaccactgtgactcaaaacaacaacagcgaatttgcttggcctggagcttcttcttgggctctcaatggacgtaatagcttgatgaatcctggacctgctatggccagccacaaagaaggagaggaccgtttctttcctttgtctggatctttaatttttggcaaacaaggaactggaagagacaacgtggatgcggacaaagtcatgataaccaacgaagaagaaattaaaactactaacccggtagcaacggagtcctatggacaagtggccacaaaccaccagagtgcccaagcacaggcgcagaccggctgggttcaaaaccaaggaatacttccaggtatggtttggcaggacagagatgtgtacctgcaaggacccatttgggccaaaattcctcacacggacggcaactttcacccttctccgctgatgggagggtttggaatgaagcacccgcctcctcagatcctcatcaaaaacacacctgtacctgcggatcctccaacggccttcaacaaggacaagctgaactctttcatcacccagtattctactggccaagtcagcgtggagatcgagtgggagctgcagaaggaaaacagcaagcgctggaacccggagatccagtacacttccaactattacaagtctaataatgttgaatttgctgttaatactgaaggtgtatatagtgaaccccgccccattggcaccagatacctgactcgtaatctgtaattgcttgttaatcaataaaccgtttaattcgtttcagttgaactgcggcc

SEQ ID NO: 585 - DNA, 2601 bp, synthetic construct
  misc_feature 1..2601: note = source = /note="Description of Artificial Sequence: Synthetic polynucleotide"
  source 1..2601: mol_type = other DNA
ccatcgacgtcagacgcggaagcttcgatcaactacgcggacaggtaccaaaacaaatgttctcgtcacgtgggcatgaatctgatgctgtttccctgcagacaatgcgagagactgaatcagaattcaaatatctgcttcactcacggtgtcaaagactgtttagagtgctttcccgtgtcagaatctcaacccgtttctgtcgtcaaaaaggcgtatcagaaactgtgctacattcatcacatcatgggaaaggtgccagacgcttgcactgcttgcgacctggtcaatgtggacttggatgactgtgtttctgaacaataaatgacttaaaccaggtatggctgccgatggttatcttccagattggctcgaggacaaccttagtgaaggaattcgcgagtggtgggctttgaaacctggagcccctcaacccaaggcaaatcaacaacatcaagacaacgctcgaggtcttgtgcttccgggttacaaataccttggacccggcaacggactcgacaagggggagccggtcaacgcagcagacgcggcggccctcgagcacgacagggcctacgaccagcagctcaaggccggagacaacccgtacctcaagtacaaccacgccgacgccgagttccaggagcggctcaaagaagatacgtcttttgggggcaacctcgggcgagcagtcttccaggccaaaaagaggcttcttgaacctcttggtctggttgaggaagcggctaagacggctcctggaaagaagaggcctgtagagcagtctcctcaggaaccggactcctccgcgggtattggcaaatcgggtgcacagcccgctaaaaagagactcaatttcggtcagactggcgacacagagtcagtcccagaccctcaaccaatcggagaacctcccgcagccccctcaggtgtgggatctcttacaatggcttcaggtggtggcgcaccagtggcagacaataacgaaggtgccgatggagtgggtagttcctcgggaaattggcattgcgattcccaatggctgggggacagagtcatcaccaccagcacccgaacctgggccctgcccacctacaacaatcacctctacaagcaaatctccaacagcacatctggaggatcttcaaatgacaacgcctacttcggctacagcaccccctgggggtattttgacttcaacagattccactgccacttctcaccacgtgactggcagcgactcatcaacaacaactggggattccggcctaagcgactcaacttcaagctcttcaacattcaggtcaaagaggttacggacaacaatggagtcaagaccatcgccaataaccttaccagcacggtccaggtcttcacggactcagactatcagctcccgtacgtgctcgggtcggctcacgagggctgcctcccgccgttcccagcggacgttttcatgattcctcagtacgggtatctgacgcttaatgatggaagccaggccgtgggtcgttcgtccttttactgcctggaatatttcccgtcgcaaatgctaagaacgggtaacaacttccagttcagctacgagtttgagaacgtacctttccatagcagctacgctcacagccaaagcctggaccgactaatgaatccactcatcgaccaatacttgtactatctctcaaagactattaacggttctggacagaatcaacaaacgctaaaattcagtgtggccggacctagcaacatggctgtccagggaagaaactacatacctggacccagctaccgacaacaacgtgtctcaaccactgtgactcaaaacaacaacagcgaatttgcttggcctggagcttcttcttgggctctcaatggacgtaatagcttgatgaatcctggacctgctatggccagccacaaagaaggagaggaccgtttctttcctttgtctggatctttaatttttggcaaacaaggaactggaagagacaacgtggatgcggacaaagtcatgataaccaacgaagaagaaattaaaactactaacccggtagcaacggagtcctatggacaagtggccacaaaccaccagagtgcccaagcacaggcgcagaccggctgggttcaaaaccaaggaatacttccgggtatggtttggcaggacagagatgtgtacctgcaaggacccatttgggccaaaattcctcacacggacggcaactttcacccttctccgctgatgggagggtttggaatgaagcacccgcctcctcagatcctcatcaaaaacacacctgtacctgcggatcctccaacggccttcaacaaggacaagctgaactctttcatcacccagtattctactggccaagtcagcgtggagatcgagtgggagctgcagaagaaaaacagcaagcgctggaacccggagatccagtacacttccaactattacaagtctaataatgttgaatttgctgttaacactgaaggtgtatatagtgaaccccgccccattggcaccagatacctgactcgtaatctgtaattgcttgttaatcaataaaccgtttaattcgtttcagttgaactgcggcc

SEQ ID NO: 586 - DNA, 2601 bp, synthetic construct
  misc_feature 1..2601: note = source = /note="Description of Artificial Sequence: Synthetic polynucleotide"
  source 1..2601: mol_type = other DNA
ccatcgacgtcagacgcggaagcttcgatcaactacgcggacaggtaccaaaacaaatgttctcgtcacgtgggcatgaatctgatgctgtttccctgcagacaatgcgagagactgaatcagaattcaaatatctgcttcactcacggtgtcaaagactgtttagagtgctttcccgtgtcagaatctcaacccgtttctgtcgtcaaaaaggcgtatcagaaactgtgctacattcatcacatcatgggaaaggtgccagacgcttgcactgcttgcgacctggtcaatgtggacttggatgactgtgtttctgaacaataaatgacttaaaccaggtatggctgccgatggttatcttccagattggctcgaggacaaccttagtgaaggaattcgcgagtggtgggctttgaaacctggagcccctcaacccaaggcaaatcaacaacatcaagacaacgctcgaggtcttgtgcttccgggttacaaataccttggacccggcaacggactcgacaagggggagccggtcaacgcagcagacgcggcggccctcgagcacgacaaggcctacgaccagcagctcaaggccggagacaacccgtacctcaagtacaaccacgccgacgccgagttccaggagcggctcaaagaagatacgtcttttgggggcaacctcgggcgagcagtcttccaggccaaaaagaggcttcttgaacctcttggtctggttgaggaagcggctaagacggctcctggaaagaagaggcctgtagagcagtctcctcaggaaccggactcctccgcgggtattggcaaatcgggtgcacagcccgctaaaaagagactcaatttcggtcagactggcgacacagagtcagtcccagaccctcaaccaatcggagaacctcccgcagccccctcaggtgtgggatctcttacaatggcttcaggtggtggcgcaccagtggcagacaataacgaaggtgccgatggagtgggtagttcctcgggaaattggcattgcgattcccaatggctgggggacagagtcatcaccaccagcacccgaacctgggccctgcccacctacaacaatcacctctacaagcaaatctccaacagcacatctggaggatcttcaaatgacaacgcctacttcggctacagcaccccctgggggtattttgacttcaacagattccactgccacttctcaccacgtgactggcagcgactcatcaacaacaactggggattccggcctaagcgactcaacttcaagctcttcaacattcaggtcaaagaggttacggacaacaatggagtcaagaccatcgccaataaccttaccagcacggtccaggtcttcacggactcagactatcagctcccgtacgtgctcgggtcggctcacgagggctgcctcccgccgttcccagcggacgttttcatgattcctcagtacgggtatctgacgcttaatgatggaagccaggccgtgggtcgttcgtccttttactgcctggaatatttcccgtcgcaaatgctaagaacgggtaacaacttccagttcagctacgagtttgagaacgtacctttccatagcagctacgctcacagccaaagcctggaccgactaatgaatccactcatcgaccaatacttgtactatctctcaaagactattaacggttctggacagaatcaacaaacgctaaaattcagtgtggccggacccagcaacatggctgtccagggaagaaactacatacctggacccagctaccgacaacaacgtgtctcaaccactgtgactcaaaacaacaacagcgaatttgcttggcctggagcttcttcttgggctctcaatggacgtaatagcttgatgaatcctggacctgctatggccagccacaaagaaggagaggaccgtttctttcctttgtctggatctttaatttttggcaaacaaggaactggaagagacaacgtggatgcggacaaagtcatgataaccaacgaagaagaaattaaaactactaacccggtagcaacggagtcctatggacaagtggccacaaaccaccagagtgcccaagcacgggcgcagaccggctgggttcaaaaccaaggaatacttccgggtatggtttggcaggacagagatgtgtacctgcaaggacccatttgggccaaaattcctcacacggacggcaactttcacccttctccgctgatgggagggtttggaatgaagcacccgcctcctcagatcctcatcaaaaacacacctgtacctgcggatcctccaacggccttcaacaaggacaagctgaactctttcatcacccagtattctactggccaagtcagcgtggagatcgagtgggagctgcagaaggaaaacagcaagcgctggaacccggagatccagtacacttccaactattacaagtctaataatgttgaatttgctgttaatactgaaggtgtatatagtgaaccccgccccattggcaccagatacctgactcgtaatctgtaattgcttgttaatcaataaaccgtttaattcgtttcagttgaactgcggcc

SEQ ID NO: 587 - DNA, 2601 bp, synthetic construct
  misc_feature 1..2601: note = source = /note="Description of Artificial Sequence: Synthetic polynucleotide"
  source 1..2601: mol_type = other DNA
ccatcgacgtcagacgcggaagcttcgatcaactacgcggacaggtaccaaaacaaatgttctcgtcacgtgggcatgaatctgatgctgtttccctgcagacaatgcgagagactgaatcagaattcaaatatctgcttcactcacggtgtcaaagactgtttagagtgctttcccgtgtcagaatctcaacccgtttctgtcgtcaaaaaggcgtatcagaaactgtgctacattcatcacatcatgggaaaggtgccagacgcttgcactgcttgcgacctggtcaatgtggacttggatgactgtgtttctgaacaataaatgacttaaaccaggtatggctgccgatggttatcttccagattggctcgaggacaaccttagtgaaggaattcgcgagtggtgggctttgaaacctggagcccctcaacccaaggcaaatcaacaacatcaagacaacgctcgaggtcttgtgcttccgggttacaaataccttggacccggcaacggactcgacaagggggagccggtcaacgcagtagacgcggcggccctcgagcacgacaaggcctacgaccagcagctcaaggccggagacaacccgtacctcaagtacaaccacgccgacgccgagttccaggagcggctcaaagaagatacgtcttttgggggcaacctcgggcgagcagtcttccaggccaaaaagaggcttcttgaacctcttggtctggttgaggaagcggctaagacggctcctggaaagaagaggcctgtagagcagtctcctcaggaaccggactcctccgcgggtattggcaaatcgggtgcacagcccgctaaaaagagactcaatttcggtcagactggcgacacagagtcagtcccagaccctcaaccaatcggagaacctcccgcagccccctcaggtgtgggatctcttacaatggcttcaggtggtggcgcaccagtggcagacaataacgaaggtgccgatggagtgggtagttcctcgggaaattggcattgcgattcccaatggctgggggacagagtcatcaccaccagcacccgaacctgggccctgcccacctacaacaatcacctctacaagcaaatctccaacagcacatctggaggatcttcaaatgacaacgcctacttcggctacagcaccccctgggggtattttgacttcaacagattccactgccacttctcaccacgtgactggcagcgactcatcaacaacaactggggatttcggcctaagcgactcaacttcaagctcttcaacattcaggtcaaagaggttacggacaacaatggagtcaagaccatcgccaataaccttaccagcacggtccaggtcttcacggactcagactatcagctcccgtacgtgctcgggtcggctcacgagggctgcctcccgccgttcccagcggacgttttcatgattcctcagtacgggtatctgacgcttaatgatggaagccaggccgtgggtcgttcgtccttttactgcctggaatatttcccgtcgcaaatgctaagaacgggtaacaacttccagttcagctacgagtttgagaacgtacctttccatagcagctacgctcacagccaaagcctggaccgactaatgaatccactcatcgaccaatacttgtactatctctcaaagactattaacggttctggacagaatcaacaaacgctaaaattcagtgtggccggacccagcaacatggctgtccagggaagaaactacatacctggacccagctaccgacaacaacgtgtctcaaccactgtgactcaaaacaacaacagcgaatttgcttggcctggagcttcttcttgggctctcaatggacgtaatagcttgatgaatcctggacctgctatggccagccacaaagaaggagaggaccgtttctttcctttgtctggatctttaatttttggcaaacaaggaactggaagagacaacgtggatgcggacaaagtcatgataaccaacgaagaagaaattaaaactactaacccggtagcaacggagtcctatggacaagtggccacaaaccaccagagtgcccaagcacaggcgcagaccggctgggttcaaaaccaaggaatacttccgggtatggtttggcaggacagagatgtgtacctgcaaggacccatttgggccaaaattcctcacacggacggcaactttcacccttctccgctgatgggagggtttggaatgaagcacccgcctcctcagatcctcatcaaaaacacacctgtacctgcggatcctccaacggccttcaacaaggacaagctgaactctttcatcacccagtattctactggccaagtcagcgtggagatcgagtgggagctgcagaaggaaaacagcaagcgctggaacccggagatccagtacacttccaactattacaagtctaataatgttgaatttgctgttaatactgaaggtgtatatagtgaaccccgccccattggcaccagatacctgactcgtaatctgtaattgcttgttaatcaataaaccgtttaattcgtttcagttgaactgcggcc

SEQ ID NO: 588 - DNA, 2580 bp, synthetic construct
  misc_feature 1..2580: note = source = /note="Description of Artificial Sequence: Synthetic polynucleotide"
  source 1..2580: mol_type = other DNA
ccatcgacgtcagacgcggaagcttcgatcaactacgcggacaggtaccaaaacaaatgttctcgtcacgtgggcatgaatctgatgctgtttccctgcagacaatgcgagagactgaatcagaattcaaatatctgcttcactcacggtgtcaaagactgtttagagtgctttcccgtgtcagaatctcaacccgtttctgtcgtcaaaaaggcgtatcagaaactgtgctacattcatcacatcatgggaaaggtgccagacgcttgcactgcttgcgacctggtcaatgtggacttggatgactgtgtttctgaacaataaatgacttaaaccaggtatggctgccgatggttatcttccagattggctcgaggacaaccttagtgaaggaattcgcgagtggtgggctttgaaacctggagcccctcaacccaaggcaaatcaacaacatcaagacaacgctcgaggtcttgtgcttccgggttacaaataccttggacccggcaacggactcgacaagggggagccggtcaacgcagcagacgcggcggccctcgagcacgacaaggcctacgaccagcagctcaaggccggagacaacccgtacctcaagtacaaccacgccgacgccgagttccaggagcggctcaaagaagatacgtcttttgggggcaacctcgggcgagcagtcttccaggccaaaaagaggcttcttgaacctcttggtctggttgaggaagcggctaagacggctcctggaaagaagaggcctgtagagcagtctcctcgggaaccggactcctccgcgggtattggcaaatcgggtgcacagcccgctaaaaagagactcaatttcggtcagactggcgacacagagtcagtcccagaccctcaaccaatcggagaacctcccgcagccccctcaggtgtgggatctcttacaatggcttcaggtggtggcgcaccagtggcagacaataacgaaggtgccgatggagtgggtagttcctcgggaaattggcattgcgattcccaatggctgggggacagagtcatcaccaccagcacccgaacctgggccctgcccacctacaacaatcacctctacaagcaaatctccaacagcacatctggaggatcttcaaatgacaacgcctacttcggctacagcaccccctgggggtattttgacttcaacagattccactgccacttctcaccacgtgactggcagcgactcatcaacaacaactggggattccggcctaagcgactcaacttcaagctcttcaacattcaggtcaaagaggttacggacaacaatggagtcaagaccatcgccaataaccttaccagcacggtccaggtcttcacggactcagactatcagctcccgtacgtgctcgggtcggctcacgagggctgcctcccgccgttcccagcggacgttttcatgattcctcagtacgggtatctgacgcttaatgatggaagccaggccgtgggtcgttcgtccttttactgcctggaatatttcccgtcgcaaatgctaagaacgggtaacaacttccagttcagctacgagtttgagaacgtacctttccatagcagctacgctcacagccaaagcctggaccgactaatgaatccactcatcgaccaatacttgtactatctctcaaagactattaacggttctggacagaatcaacaaacgctaaaattcagtgtggccggacccagcaacatggctgtccagggaagaaactacatacctggacccagctaccgacaacaacgtgtctcaaccactgtgactcaaaacaacaacagcgaatttgcttggcctggagcttcttcttgggctctcaatggacgtaatagcttgatgaatcctggacctgctatggccagccacaaagaaggagaggaccgtttctttcctttgtctggatctttaatttttggcaaacaaggaactggaagagacaacgtggatgcggacaaagtcatgataaccaacgaagaagaaattaaaactactaacccggtagcaacggagtcctatggacaagtggccacaaaccaccagagtgcccaagcacaggcgcagaccggctgggttcaaaaccaaggaatacttccgggtatggtttggcaggacagagatgtgtacctgcaaggacccatttgggccaaaattcctcacacggacggcaactttcacccttctccgctgatgggagggtttggaatgaagcacccgcctcctcagatcctcatcaaaaacacacctgtacctgcggatcctccaacggccttcaacaaggacaagctgaactctttcatcacccagtattctactggccaagtcagcgtggagatcgagtgggaactgcagaaggaaaacagcaagcgctggaacccggagatccagtacacttccaactattacaagtctaataatgttgaatttgctgttaatactgaaggtgtatatagtgaaccccgccccattggcaccagatacctgactcgtaatctgtaattgcttgttaatcaataaaccgtttaatt

SEQ ID NO: 589 - DNA, 2601 bp, synthetic construct
  misc_feature 1..2601: note = source = /note="Description of Artificial Sequence: Synthetic polynucleotide"
  source 1..2601: mol_type = other DNA
ccatcgacgtcagacgcggaagcttcgatcaactacgcggacaggtaccaaaacaaatgttctcgtcacgtgggcatgaatctgatgctgtttccctgcagacaatgcgagagactgaatcagaattcaaatatctgcttcactcacggtgtcaaagactgtttagagtgctttcccgtgtcagaatctcaacccgtttctgtcgtcaaaaaggcgtatcagaaactgtgctacattcatcacatcatgggaaaggtgccagacgcttgcactgcttgcgacctggtcaatgtggacttggatgactgtgtttctgaacaataaatgacttaaaccaggtatggctgccgatggttatcttccagattggctcgaggacaaccttagtgaaggaattcgcgagtggtgggctttgaaacctggagcccctcaacccaaggcaaatcaacaacatcaagacaacgctcgaggtcttgtgcttccgggttacaaataccttggacccggcaacggactcgacaagggggagccggtcaacgcagcagacgcggcggccctcgagcacgacaaggcctacgaccagcagctcaaggccggagacaacccgtacctcaagtacaaccacgccgacgccgagttccaggagcggctcaaagaagatacgtcttttgggggcaacctcgggcgagcagtctttcaggccaaaaagaggcttcttgaacctcttggtctggttgaggaagcggctaagacggctcctggaaagaagaggcctgtagagcagtctcctcaggaaccggactcctccgcgggtattggcaaatcgggtgcacagcccgctaaaaagagactcaatttcggtcagactggcgacacagagtcagtcccagaccctcaaccaatcggagaacctcccgcagccccctcaggtgtgggatctcttacaatggcttcatgtggtggcgcaccagtggcagacaataacgaaggtgccgatggagtgggtagttcctcgggaaattggcattgcgattcccaatggctgggggacagagtcatcaccaccagcacccgaacctgggccctgcccacctacaacaatcacctctacaagcaaatctccaacagcacatctggaggatcttcaaatgacaacgcctacttcggctacagcaccccctgggggtattttgacttcaacagattccactgccacttctcaccacgtgactggcagcgactcatcaacaacaactggggattccggcctaagcgactcaacttcaagctcttcaacattcaggtcaaagaggttacggacaacaatggagtcaagaccatcgccaataaccttaccagcacggtccaggtcttcacggactcagactatcagctcccgtacgtgctcgggtcggctcacgagggctgcctcccgccgttcccagcggacgttttcatgattcctcagtacgggtatctgacgcttaatgatggaagccaggccgtgggtcgttcgtccttttactgcctggaatatttcccgtcgcaaatgctaagaacgggtaacaacttccagttcagctacgagtttgagaacgtacctttccatagcagctacgctcacagccaaagcctggaccgactaatgaatccactcatcgaccaatacttgtactatctctcaaagactattaacggttctggacagaatcaacaaacgctaaaattcagtgtggccggacccagcaacatggctgtccagggaagaaactacatacctggacccagctaccgacaacaacgtgtctcaaccactgtgactcaaaacaacaacagcgaatttgcttggcctggagcttcttcttgggctctcaatggacgtaatagcttgatgaatcctggacctgctatggccagccacaaagaaggagaggaccgtttctttcctttgtctggatctttaatttttggcaaacaaggaactggaagagacaacgtggatgcggacaaagtcatgataaccaacgaagaagaaattaaaactactaacccggtagcaacggagtcctatggacaagtggccacaaaccaccagagtgcccaagcacaggcgcagaccggctgggttcaaaaccaaggaatacttccgggtatggtttggcaggacagagatgtgtacctgcaaggacccatttgggccaaaattcctcacacggacggcaactttcacccttctccgctgatgggagggtttggaatgaagcacccgcctcctcagatcctcatcaaaaacacacctgtacctgcggatcctccaacggccttcaacaaggacaagctgaactctttcatcacccagtattctactggccaagtcagcgtggagatcgagtgggagctgcagaaggaaaacagcaagcgctggaacccggagatccagtacacttccaactattacaagtctaataatgttgaatttgctgttaatactgaaggtgtatatagtgaaccccgccccattggcaccagatacctgactcgtaatctgtaattgcttgttaatcaataaaccgtttaattcgtttcagttgaactgcggcc

SEQ ID NO: 590 - DNA, 2601 bp, synthetic construct
  misc_feature 1..2601: note = source = /note="Description of Artificial Sequence: Synthetic polynucleotide"
  source 1..2601: mol_type = other DNA
ccatcgacgtcagacgcggaagcttcgatcaactacgcggacaggtaccaaaacaaatgttctcgtcacgtgggcatgaatctgatgctgtttccctgcagacaatgcgagagactgaatcagaattcaaatatctgcttcactcacggtgtcaaagactgtttagagtgctttcccgtgtcagaatctcaacccgtttctgtcgtcaaaaaggcgtatcagaaactgtgctacattcatcacatcatgggaaaggtgccagacgcttgcactgcttgcgacctggtcaatgtggacttggatgactgtgtttctgaacaataaatgacttaaaccaggtatggctgccgatggttatcttccagattggctcgaggacaaccttagtgaaggaattcgcgagtggtgggctttgaaacctggagcccctcaacccaaggcaaatcaacaacatcaagacaacgctcgaggtcttgtgcttccgggttacaaataccttggacccggcaacggactcgacaagggggagccgatcaacgcagcagacgcggcggccctcgagcacgacaaggcctacgaccagcagctcaaggccggagacaacccgtacctcaagtacaaccacgccgacgccgagttccaggagcggctcaaagaagatacgtcttttgggggcaacctcgggcgagcagtcttccaggccaaaaagaggcttcttgaacctcttggtctggttgaggaagcggctaagacggctcctggaaagaagaggcctgtagagcagtctcctcaggaaccggactcctccgcgggtattggcaaatcgggtgcacagcccgctaaaaagagactcaatttcggtcagactggcgacacagagtcagtcccagaccctcaaccaatcggagaacctcccgcagccccctcaggtgtgggatctcttacaatggcttcaggtggtggcgcaccagtggcagacaataacgaaggtgccgatggagtgggtagttcctcgggaaattggcattgcgattcccaatggctgggggacagagtcatcaccaccagcacccgaacctgggccctgcccacctacaacaatcacctctacaagcaaatctccaacagcacatctggaggatcttcaaatgacaacgcctacttcggctacagcaccccctgggggtattttgacttcaacagattccactgccacttctcaccacgtgactggcagcgactcatcaacaacaactggggattccggcctaagcgactcaacttcaagctcttcaacattcaggtcaaagaggttacggacaacaatggagtcaagaccatcgccaataaccttaccagcacggtccaggtcttcacggactcagactatcagctcccgtacgtgctcgggtcggctcacgagggctgcctcccgccgttcccagcggacgttttcatgattcctcagtacgggtatctgacgcttaatgatggaagccaggccgtgggtcgttcgtccttttactgcctggaatatttcccgtcgcaaatgctaagaacgggtaacaacttccagttcagctacgagtttgagaacgtacctttccatagcagctacgctcacagccaaagcctggaccgactaatgaatccactcatcgaccaatacttgtactatctctcaaagactattaacggttctggacagaatcaacaaacgctaaaattcagtgtggccggacccagcaacatggctgtccagggaagaaactacatacctggacccagctaccgacaacaacgtgtctcaaccactgtgactcaaaacaacaacagcgaatttgcttggcctggagcttcttcttgggctctcaatggacgtaatagcttgatgaatcctggacctgctatggccagccacaaagaaggagaggaccgtttctttcctttgtctggatctttaatttttggcaaacaaggaactggaagagacaacgtggatgcggacaaagtcatgataaccaacgaagaagaaattaaaactactaacccggtagcaacggagtcctatggacaagtggccacaaaccaccagagtgcccaagcacaggcgcagaccggctgggttcaaaaccaaggaatacttccgggtatggtttggcaggacagagatgtgtacctgcaaggacccatttgggccaaaattcctcacacgtacggcaactttcacccttctccgctgatgggagggtttggaatgaagcacccgcctcctcagatcctcatcaaaaacacacctgtacctgcggatcctccaacggccttcaacaaggacaagctgaactctttcatcacccagtattctactggccaagtcagcgtggagatcgagtgggagctgcagaaggaaaacagcaagcgctggaacccggagatccagtacacttccaactattacaagtctaataatgttgaatttgctgttaatactgaaggtgtatatagtgaaccccgccccattggcaccagatacctgactcgtaatctgtaattgcttgttaatcaataaaccgtttaattcgtttcagttgaactgcggcc

SEQ ID NO: 591 - DNA, 2601 bp, synthetic construct
  misc_feature 1..2601: note = source = /note="Description of Artificial Sequence: Synthetic polynucleotide"
  source 1..2601: mol_type = other DNA
ccatcgacgtcagacgcggaagcttcgatcaactacgcggacaggtaccaaaacaaatgttctcgccacgtgggcatgaatctgatgctgtttccctgcagacaatgcgagagactgaatcagaattcaaatatctgcttcactcacggtgtcaaagactgtttagagtgctttcccgtgtcagaatctcaacccgtttctgtcgtcaaaaaggcgtatcagaaactgtgctacattcatcacatcatgggaaaggtgccagacgcttgcactgcttgcgacctggtcaatgtggacttggatgactgtgtttctgaacaataaatgacttaaaccaggtatggctgccgatggttatcttccagattggctcgaggacaaccttagtgaaggaattcgcgagtggtgggctttgaaacctggagcccctcaacccaaggcaaatcaacaacatcaagacaacgctcgaggtcttgtgcttccgggttacaaataccttggacccggcaacggactcgacaagggggagccggtcaacgcagcagacgcggcggccctcgagcacgacaaggcctacgaccagcagctcaaggccggagacaacccgtacctcaagtacaaccacgccgacgccgagttccaggagcggctcaaagaagatacgtcttttgggggcaacctcgggcgagcagtcttccaggccaaaaagaggcttcttgaacctcttggtctggttgaggaagcggctaagacggctcctggaaagaagaggcctgtagagcagtctcctcaggaaccggactcctccgcgggtattggcaaatcgggtgcacagcccgctaaaaagagactcaatttcggtcagactggcgacacagagtcagtcccagaccctcaaccaatcggagaacctcccgctgccccctcaggtgtgggatctcttacaatggcttcaggtggtggcgcaccagtggcagacaataacgaaggtgccgatggagtgggtagttcctcgggaaattggcattgcgattcccaatggctgggggacagagtcatcaccaccagcacccgaacctgggccctgcccacctacaacaatcacctctacaagcaaatctccaacagcacatctggaggatcttcaaatgacaacgcctacttcggctacagcaccccctgggggtattttgacttcaacagattccactgccacttctcaccacatgactggcagcgactcatcaacaacaactggggattccggcctaagcgactcaacttcaagctcttcaacattcaggtcaaagaggttacggacaacaatggagtcaagaccatcgccaataaccttaccagcacggtccaggtcttcacggactcagactatcagctcccgtacgtgctcgggtcggctcacgagggctgcctcccgccgttcccagcggacgttttcatgattcctcagtacgggtatctgacgcttaatgatggaagccaggccgtgggtcgttcgtccttttactgcctggaatatttcccgtcgcaaatgctaagaacgggtaacaacttccagttcagctacgagtttgagaacgtacctttccatagcagctacgctcacagccaaagcctggaccgactaatgaatccactcatcgaccaatacttgtactatctctcaaagactattaacggttctggacagaatcaacaaacgctaaaattcaatgtggccggacccagcaacatggctgtccagggaagaaactacatacctggacccagctaccgacaacaacgtgtctcaaccactgtgactcaaaacaacaacagcgaatttgcctggcctagagcttcttcttgggctctcaatggacgtaatagcttgatgaatcctggacctgctatggccagccacaaagaaggagaggaccgtttctttcctttgtctggatctttaatttttggcaaacaaggaactggaagagacaacgtggatgcggacaaagtcatgataaccaacgaagaagaaattaaaactactaacccggtagcaacggagtcctatggacaagtggccacaaaccaccagagtgcccaagcacaggcgcagaccggctgggttcaaaaccaaggaatacttccgggtatggtttggcaggacagagatgtgtacctgcaaggacccatttgggccaaaattcctcacacggacggcaactttcacccttctccgctgatgggagggtttggaatgaagcacccgcctcctcagatcctcatcaaaaacacacctgtacctgcggatcctccaacggccttcaacaaggacaagctgaactctttcatcacccagtattctactggccaagtcagcatggagatcgagtgggagctgcagaaggaaaacagcaagcgctggaacccggagatccagtacacttccaactattacaagtctaataatgttgaatttgctgttaatactgaaggtgtatatagtgaaccccgccccattggcaccagatacctgactcgtaatctgtaattgcttgttaatcaataaaccgtttaattcgtttcagttgaactgcggcc

SEQ ID NO: 592 - DNA, 2601 bp, synthetic construct
  misc_feature 1..2601: note = source = /note="Description of Artificial Sequence: Synthetic polynucleotide"
  source 1..2601: mol_type = other DNA
ccatcgacgtcagacgcggaagcttcgatcaactacgcggacaggtaccaaaacaaatgttctcgtcacgtgggcatgaatctgatgctgtttccctgcagacaatgcgagagactgaatcagaattcaaatatctgcttcactcacggtgtcaaagactgtttagagtgctttcccgtgtcagaatctcaacccgtttctgtcgtcaaaaaggcgtatcagaaactgtgctacattcatcacatcatgggaaaggtgccagacgcttgcactgcttgcgacctggtcaatgtggacttggatgactgtgtttctgaacaataaatgacttaaaccaggtatggctgccgatggttatcttccagattggctcgaggacaaccttagtgaaggaattcgcgagtggtgggctttgaaacctggagcccctcaacccaaggcaaatcaacaacatcaagacaacgctcgaggtcttgtgcttccgggttacaaataccttggacccggcaacggactcgacaagggggagccggtcaacgcagcagacgcggcggccctcgagcacgacaaggcctacgaccagcagctcaaggccggagacaacccgtacctcaagtacaaccacgccgacgccgagttccaggagcggctcaaagaagatacgtcttttgggggcaacctcgggcgagcagtcttccaggccaaaaagaggcttcttgaacctcttggtctggttgaggaagcggctaagacggctcctggaaagaagaggcctgtagagcagtctcctcaggaaccggactcctccgcgggtattggcaaatcgggtgcacagcccgctaaaaagagactcaatttcggtcagactggcgacacagagtcagtcccagaccctcaaccaatcggagaacctcccgcagccccctcaggtgtgggatctcttacaatggcttcaggtggtggcgcaccagtggcagacaataacgaaggtgccgatggagtgggtagttcctcgggaaattggcattgcgattcccaatggctgggggacagagtcatcaccaccagcacccgaacctgggccctgcccacctacaacaatcacctctacaagcaaatctccaacagcacatctggaggatcttcaaatgacaacgcctacttcggctacagcaccccctgggggtattttgacttcaacagattccactgccacttctcaccacgtgactggcagcgactcatcaacaacaactggggattccggcctaagcgactcaacttcaagctcttcaacattcaggtcaaagaggttacggacaacaatggagtcaagaccatcgccaataaccttaccagcacggtccaggtcttcacggactcagactatcagctcccgtacgtgctcgggtcggctcacgagggctgcctcccgccgttcccagcggacgttttcatgattcctcagtacgggtatctgacgcttaatgatggaagccaggccgtgggtcgttcgtccttttactgcctggaatatttcccgtcgcaaatgctaagaacgggtaacaacttccagttcagctacgagtttgagaacgtacctttccatagcagctacgctcacagccaaagcctggaccgactaatgaatccactcatcgaccaatacttgtactatctctcaaagactattaacggttctggacagaatcaacaaacgctaaaattcagtgtggccggacccagcaacatggctgtccagggaagaaactacatacctggacccagctaccgacaacaacgtgtctcaaccactgtgactcaaaacaacaacagcgaatttgcttggcctagagcttcttcttgggctctcaatggacgtaatagcttgatgaatcctggacctgctatggccagccacaaagaaggagaggaccgtttctttcctttgtctggatctttaatttttggcaaacaaggaactggaagagacaacgtggatgcggacaaagtcatgataaccaacgaagaagaaattaaaactactaacccggtagcaacggagtcctatggacaagtggccacaaaccaccagagtgcccaagcacaggcgcagaccggctgggttcaaaaccaaggaatacttccgggtatggtttggcaggacagagatgtgtacctgcaaggacccatttgggccaaaattcctcacacggacggcaactttcacccttctccgctgatgggagggtttggaatgaagcacccgcctcctcagatcctcatcaaaaacacacctgtacctgcggatcctccaacggccttcaacaaggacaagctgaactctttcatcacccagtattctactggccaagtcagcgtggagatcgagtgggagctgcagaaggaaaacagcaagcgctggaacccggagatccagtacacttccaactattacaagtctaataatgttgaatttgctgttaatactgaaggtgtatatagtgaaccccgccccattggcaccagatacctgactcgtaatctgtaattgcttgttaatcaataaaccgtttaattcgtttcagttgaactgcggcc

SEQ ID NO: 593 - DNA, 2601 bp, synthetic construct
  misc_feature 1..2601: note = source = /note="Description of Artificial Sequence: Synthetic polynucleotide"
  source 1..2601: mol_type = other DNA
ccatcgacgtcagacgcggaagcttcgatcaactacgcggacaggtaccaaaacaaatgttctcgtcacgtgggcatgaatctgatgctgtttccctgcagacaatgcgagagactgaatcagaattcaaatatctgcttcactcacggtgtcaaagactgtttagagtgctttcccgtgtcagaatctcaacccgtttctgtcgtcaaaaaggcgtatcagaaactgtgctacattcatcacatcatgggaaaggtgccagacgcttgcactgcttgcgacctggtcaatgtggacttggatgactgtgtttctgaacaataaatgacttaaaccaggtatggctgccgatggttatcttccagattggctcgaggacaaccttagtgaaggaattcgcgagtggtgggctttgaaacctggagcccctcaacccaaggcaaatcaacaacatcaagacaacgctcgaggtcttgtgcttccgggttacaaataccttggacccggcaacggactcgacaagggggagccggtcaacgcagcagacgcggcggccctcgagcacgacaaggcctacgaccagcagctcaaggccggagacaacccgtacctcaagtacaaccacgccgacgccgagttccaggagcggctcaaagaagatacgtcttttgggggcaacctcgggcgagcagtcttccaggccaaaaagaggcttcttgaacctcttggtctggttgaggaagcggctaagacggctcctggaaagaagaggcctgtagagcagtctcctcaggaaccggactcctccgcgggtattggcaaatcgggtgcacagcccgctaaaaagagactcaatttcggtcagactggcgacacagagtcagtcccagaccctcaaccaatcggagaacctcccgcagccccctcaggtgtgggatctcttacaatggcttcaggtggtggcgcaccagtggcagacaataacgaaggtgccgatggagtgggtagttcctcgggaaattggcattgcgattcccaatggctgggggacagagtcatcaccaccagcacccgaacctgggccctgcccacctacaacaatcacctctacaagcaaatctccaacagcacatctggaggatcttcaaatgacaacgcctacttcggctacagcaccccctgggggtattttgacttcaacagattccactgccacttctcaccacgtgactggcagcgactcatcaacaacaactggggattccggcctaagcgactcaacttcaagctcttcaacattcaggtcaaagaggttacggacaacaatggagtcaagaccatcgccaataaccttaccagcacggtccaggtcttcacggactcagactatcagctcccgtacgtgctcgggtcggctcacgagggctgcctcccgccgttcccagcggacgttttcatgattcctcagtacgggtatctgacgcttaatgatggaagccaggccgtgggtcgttcgtccttttactgcctggaatatttcccgtcgcaaatgctaagaacgggtaacaacttccagttcagctacgagtttgagaacgtacctttccatagcagctacgctcacagccaaagcctggaccgactaatgaatccactcatcgaccaatacttgtactatctctcaaagactattaacggttctggacagaatcaacaaacgctaaaattcagtgtggccggacccagcaacatggctgtccagggaagaaactacatacctggacccagctaccgacaacaacgtgtctcaaccactgtgactcaaaacaacaacagcgaatttgcttggcctagagcttcttcttgggctctcaatggacgtaatagcttgatgaatcctggacctgctatggccagccacaaagaaggagaggaccgtttctttcctttgtctggatctttaatttttggcaaacaaggaactggaagagacaacgtggatgcggacaaagtcatgataaccaacgaagaagaaattaaaactactaacccggtagcaacggagtcctatggacaagtggccacaaaccaccagagtgcccaagcacaggcgcagaccggctgggttcaaaaccaaggaatacttccgggtatggtttggcaggacagagatgtgtacctgcaaggacccatttgggccaaaattcctcacacggacggcaactttcacccttctccgctgatgggagggtttggaatgaagcacccgcctcctcagatcctcatcaaaaacacacctgtacctgcggatcctccaacggccttcaacaaggacaagctgaactctttcatcacccagtattctactggccaagtcagcgtggagatcgagtgggagcggcagaaggaaaacagcaagcgctggaacccggagatccagtacacttccaactattacaagtctaataatgttgaatttgctgttaatactgaaggtgtatatagtgaaccccgccccattggcaccagatacctgactcgtaatctgtaattgcttgttaatcaataaaccgtttaattcgtttcagttgaactgcggcc

SEQ ID NO: 594 - DNA, 2601 bp, synthetic construct
  misc_feature 1..2601: note = source = /note="Description of Artificial Sequence: Synthetic polynucleotide"
  source 1..2601: mol_type = other DNA
ccatcgacgtcagacgcggaagcttcgatcaactacgcggacaggtaccaaaacaaatgttctcgtcacgtgggcatgaatctgatgctgtttccctgcagacaatgcgagagactgaatcagaattcaaatatctgcttcactcacggtgtcaaagactgtttagagtgctttcccgtgtcagaatctcaacccgtttctgtcgtcaaaaaggcgtatcagaaactgtgctacattcatcacatcatgggaaaggtgccagacgcttgcactgcttgcgacctggtcaatgtggacttggatgactgtgtttctgaacaataaatgacttaaaccaggtatggctgccgatggttatcttccagattggctcgaggacaaccttagtgaaggaattcgcgagtggtgggctttgaaacctggagcccctcaacccaaggcaaatcaacaacatcaagacaacgctcgaggtcttgtgcttccgggttacaaataccttggacccggcaacggactcgacaagggggagccggtcaacgcagcagacgcggcggccctcgagcacgacaaggcctacgaccagcagctcaaggccggagacaacccgtacctcaagtacaaccacgccgacgccgagttccaggagcggctcaaagaagatacgtcttttgggggcaacctcgggcgagcagtcttccaggccaaaaagaggcttcttgaacctcttggtctggttgaggaagcggctaagacggctcctggaaagaagaggcctgtagagcagtctcctcaggaaccggactcctccgcgggtattggcaaatcgggtgcacagcccgctaaaaagagactcaatttcggtcagactggcgacacagagtcagtcccagaccctcaaccaatcggagaacctcccgcagccccctcaggtgtgggatctcttacaatggcttcaggtggtggcgcaccagtggcagacaataacgaaggtgccgatggagtgggtagttcctcgggaaattggcattgcgattcccaatggctgggggacagagtcatcaccaccagcacccgaacctgggccctgcccacctacaacaatcacctctacaagcaaatctccaacagcacatctggaggatcttcaaatgacaacgcctacttcggctacagcaccccctgggggtattttgacttcaacagattccactgccacttctcaccacgtgactggcagcgactcatcaacaacaactggggattccggcctaagcgactcaacttcaagctcttcaacattcaggtcaaagaggttacggacaacaatggagtcaagaccatcgccaataaccttaccagcacggtccaggtcttcgcggactcagactatcagctcccgtacgtgctcgggtcggctcacgagggctgcctcccgccgttcccagcggacgttttcatgattcctcagtacgggtatctgacgcttaatgatggaagccaggccgtgggtcgttcgtccttttactgcctggaatatttcccgtcgcaaatgctaagaacgggtaacaacttccagttcagctacgagtttgagaacgtacctttccatagcagctacgctcacagccaaagcctggaccgactaatgaatccactcatcgaccaatacttgtactatctctcaaagactattaacggttctggacagaatcaacaaacgctaaaattcagtgtggccggacccagcaacatggctgtccagggaagaaactacatacctggacccagctaccgacaacaacgtgtctcaaccactgtgactcaaaacaacaacagcgaatttgcttggcctagagcttcttcttgggctctcaatggacgtaatagcttgatgaatcctggacctgctatggccagccacaaagaaggagaggaccgtttctttcctttgtctggatctttaatttttggcaaacaaggaactggaagagacaacgtggatgcggacaaagtcatgataaccaacgaagaagaaattaaaactactaacccggtagcaacggagtcctatggacaagtggccacaaaccaccagagtgcccaagcacaggcgcagaccggctgggttcaaaaccaaggaatacttccgggtatggtttggcaggacagagatgtgtacctgcaaggacccatttgggccaaaattcctcacacggacggcaactttcacccttctccgctgatgggagggtttggaatgaagcacccgcctcctcagatcctcatcaaaaacacacctgtacctgcggatcctccaacggccttcaacaaggacaagctgaactctttcatcacccagtattctactggccaagtcagcgtggagatcgagtgggagctgcagaaggaaaacagcaagcgctggaacccggagatccagtacacttccaactattacaagtctaataatgttgaatttgctgttaatactgaaggtgtatatagtgaaccccgccccattggcaccagatacctgactcgtaatctgtaattgcttgttaatcaataaaccgtttaattcgtttcagttgaactgcggcc

SEQ ID NO: 595 - DNA, 2601 bp, synthetic construct
  misc_feature 1..2601: note = source = /note="Description of Artificial Sequence: Synthetic polynucleotide"
  source 1..2601: mol_type = other DNA
ccatcgacgtcagacgcggaagcttcgatcaactacgcggacaggtaccaaaacaaatgttctcgtcacgtgggcatgaatctgatgctgtttccctgcagacaatgcgagagactgaatcagaattcaaatatctgcttcactcacggtgtcaaagactgtttagagtgctttcccgtgtcagaatctcaacccgtttctgtcgtcaaaaaggcgtatcagaaactgtgctacattcatcacatcatgggaaaggtgccagacgcttgcactgcttgcgacctggtcaatgtggacttggatgactgtgtttctgaacaataaatgacttaaaccaggtatggctgccgatggttatcttccagattggctcgaggacaaccttagtgaaggaattcgcgagtggtgggctttgaaacctggagcccctcaacccaaggcaaatcaacaacatcaagacaacgctcgaggtcttgtgcttccgggttacaaataccttggacccggcaacggactcgacaagggggagccggtcaacgcagcagacgcggcggccctcgagcacgacaaggcctacgaccagcagctcaaggccggagacaacccgtacctcaagtacaaccacgccgacgccgagttccaggagcggctcaaagaagatacgtcttttgggggcaacctcgggcgagcagtcttccaggccaaaaagaggcttcttgaacctcttggtctggttgaggaagcggctaagacggctcctggaaagaagaggcctgtagagcagtctcctcaggaaccggactcctccgcgggtattggcaaatcgggtgcacagcccgctaaaaagagactcaatttcggtcagactggcgacacagagtcagtcccagaccctcaaccaatcggagaacctcccgcagccccctcaggtgtgggatctcttacaatggcttcaggtggtggcgcaccagtggcagacaataacgaaggtgccgatggagtgggtagttcctcgggaaattggcattgcgattcccaatggctgggggacagagtcatcaccaccagcacccgaacctgggccctgcccacctacaacaatcacctctacaagcaaatctccaacagcacatctggaggatcttcaaatgacaacgcctacttcggctacagcaccccctgggggtattttgacttcaacagattccactgccacttctcaccacgtgactggcagcgactcatcaacaacaactggggattccggcctaagcgactcaacttcaagctcttcaacattcaggtcaaagaggttacggacaacaatggagtcaagaccatcgccaataaccttaccagcacggtccaggtcttcacggactcagactatcagctcccgtacgtgctcgggtcggctcacgagggctgcctcccgccgttcccagcggacgttttcatgattcctcagtacgggtatctgacgcttaatgatggaagccaggccgtgggtcgttcgtccttttactgcctggaatatttcccgtcgcaaatgctaagaacgggtaacaacttccagttcagctacgagtttgagaacgtacctttccatagcagctacgctcacagccaaagcctggaccgactaatgaatccactcatcgaccaatacttgtactatctctcaaagactattaacggttctggacagaatcaacaaacgctaaaattcagtgtggccggacccagcaacatggctgtccagggaagaaactacatacctggacccagctaccgacaacaacgtgtctcaaccactgtgactcaaaacaacaacagcgaaattgcttggcctagagcttcttcttgggctctcaatggacgtaatagcttgatgaatcctggacctgctatggccagccacaaagaaggagaggaccgtttctttcctttgtctggatctttaatttttggcaaacaaggaactggaagagacaacgtggatgcggacaaagtcatgataaccaacgaagaagaaattaaaactactaacccagtagcaacggagtcctatggacaagtggccacaaaccaccagagtgcccaagcacaggcgcagaccggctgggttcaaaaccaaggaatacttccgggtatggtttggcaggacagagatgtgtacctgcaaggacccatttgggccaaaattcctcacacggacggcaactttcacccttctccgctgatgggagggtttggaatgaagcacccgcctcctcagatcctcatcaaaaacacacctgtacctgcggatcctccaacggccttcaacaaggacaagctgaactctttcatcacccagtattctactggccaagtcagcgtggagatcgagtgggagctgcagaaggaaaacagcaagcgctggaacccggagatccagtacacttccaactattgcaagtctaataatgttgaatttgctgttaatactgaaggtgtatatagtgaaccccgccccattggcaccagatacctgactcgtaatctgtaattgcttgttaatcaataaaccgtttaattcgtttcagttgaactgcggcc

SEQ ID NO: 596 - DNA, 2601 bp, synthetic construct
  misc_feature 1..2601: note = source = /note="Description of Artificial Sequence: Synthetic polynucleotide"
  source 1..2601: mol_type = other DNA
ccatcgacgtcagacgcggaagcttcgatcaactacgcggacaggtaccaaaacaaatgttctcgtcacgtgggcatgaatctgatgctgtttccctgcagacaatgcgagagactgaatcagaattcaaatatctgcttcactcacggtgtcaaagactgtttagagtgctttcccgtgtcagaatctcaacccgtttctgtcgtcaaaaaggcgtatcagaaactgtgctacattcatcacatcatgggaaaggtgccagacgcttgcactgcttgcgacctggtcaatgtggacttggatgtctgtgtttctgaacaataaatgacttaaaccaggtatggctgccgatggttatcttccagattggctcgaggacaaccttagtgaaggaattcgcgagtggtgggctttgaaacctggagcccctcaacccaaggcaaatcaacaacatcaagacaacgctcgaggtcttgtgcttccgggttacaaataccttggacccggcaacggactcgataagggggagccggtcaacgcagcagacgcggcggccctcgagcacgacaaggcctacgaccagcagctcaaggccggagacaacccgtacctcaagtacaaccacgccgacgccgagttccaggagcggctcaaagaagatacgtcttttgggggcaacctcgggcgagcagtcttccaggccaaaaagaggcttcttgaacctcttggtctggttgaggaagcggctaagacggctcctggaaagaagaggcctgtagagcagtctcctcaggaaccggactcctccgcgggtattggcaaatcgggtgcacagcccgctaaaaagagactcaatttcggtcagactggcgacacagagtcagtcccagaccctcaaccaatcggagaacctcccgcagccccctcaggtgtgggatctcttacaatggcttcaggtggtggcgcaccagtggcagacaataacgaaggtgccgatggagtgggtagttcctcgggaaattggcattgcgattcccaatggctgggggacagagtcatcaccaccagcacccgaacctgggccctgcccacctacaacaatcacctctacaagcaaatctccaacagcacatctggaggatcttcaaatgacaacgcctacttcggctacagcaccccctgggggtattttgacttcaacagattccactgccacttctcaccacgtgactggcagcgactcatcaacaacaactggggattccggcctaagcgactcaacttcaagctcttcaacattcaggtcaaagaggttacggacaacaatggagtcaagaccatcgccaataaccttaccagcacggtccaggtcttcacggactcagactatcagctcccgtacgtgctcgggtcggctcacgagggctgcctcccgccgttcccagcggacgttttcatgattcctcagtacgggtatctgacgcttaatgatggaagccaggccgtgggtcgttcgtccttttactgcctggaatatttcccgtcgcaaatgctaagaacgggtaacaacttccagttcagctacgagtttgagaacgtacctttccatagcagctacgctcacagccaaagcctggaccgactaatgaatccactcatcgaccaatacttgtactatctctcaaagactattaacggttctggacagaatcaacaaacgctaaaattcagtgtggccggacccagcaacatggctgtccagggaagaaactacatacctggacccagctaccgacaacaacgtgtctcaaccactgtgactcaaaacaacaacagcgaatttgcttggcctagagcttcttcttgggctctcaatggacgtaatagcttgatgaatcctggacctgctatggccagccacaaagaaggagaggaccgtttctttcctttgtctggatctttaatttttggcaaacaaggaactggaagagacaacgtggatgcggacaaagtcatgataaccaacgaagaagaaattaaaactactaacccggtagcaacggagtcctatggacaagtggccacaaaccaccagagtgcccaagcacaggcgcagaccggctgggttcaaaaccaaggaatacttccgggtatggtttggcaggacagagatgtgtacctgcaaggacccatttgggccaaaattcctcacacggacggcaactttcacccttctccgctgatgggagggtttggaatgaagcacccgcctcctcagatcctcatcaaaaacacacctgtacctgcggatcctccaacggccttcaacaaggacaagctgaactctttcatcacccagtattctactggccaagtcagcgtggagatcgagtgggagctgcagaaggaaaacagcaagcgctggaacccggagatccagtacacttccaactattacaagtctaataatgttgaatttgctgttaatactgaaggtgtatatagtgaaccccgccccattggcaccagatacctgactcgtaatctgtaattgcttgttaatcaataaaccgtttaattcgtttcagttgaactgcggcc

SEQ ID NO: 597 - protein, 736 aa, synthetic construct
  REGION 1..736: note = source = /note="Description of Artificial Sequence: Synthetic polypeptide"
MTADGYLPDWLEDNLSEGIREWWALKPGAPQPKANQQHQDNARGLVLPGYKYLGPGNGLDKGEPVNAADAAALEHDKAYDQQLKAGDNPYLKYNHADAEFQERLKEDTSFGGNLGRAVFQAKKRLLEPLGLVEEAAKTAPGKKRPVEQSPQEPDSSAGIGKSGAQPAKKRLNFGQTGDTESVPDPQPIGEPPAAPSGVGSLTMASGGGAPVADNNEGADGVGSSSGNWHCDSQWLGDRVITTSTRTWALPTYNNHLYKQISNSTSGGSSNDNAYFGYSTPWGYFDFNRFHCHFSPRDWQRLINNNWGFRPKQLNFKLFNIQVKEVTDNNGVKTIANNLTSTVQVFTDSDYQLPYVLGSAHEGCLPPFPADVFMIPQYGYLTLNDGSQAVGRSSFYCLEYFPSQMLRTGNNFQFSYEFENVPFHSSYAHSQSLDRLMNPLIDQYLYYLSKTINGSGQNQQTLKFSVAGPSNMAVQGRNYIPGPSYRQQRVSTTVTQNNNSEFAWPGASSWALNGRNSLMNPGPAMASHKEGEDRFFPLSGSLIFGKQGTGRDNVDADKVMITNEEEIKTTNPVATESYGQVATNHQSAQAQAQTGWVQNQGILPGMVWQDRDVYLQGPIWAKIPHTDGNFHPSPLMGGFGMKHPPPQILIKNTPVPADPPTAFNKDKLNSFITQYSTGQVSVEIEWELQKENSKRWNPEIQYTSNYYKSNNVEFAVNTEGVYSEPRPIGTRYLTRNL

SEQ ID NO: 598 - protein, 736 aa, synthetic construct
  REGION 1..736: note = source = /note="Description of Artificial Sequence: Synthetic polypeptide"
MAADGYLPDWLEDNLSEGIREWWALKPGAPQPKANQQHQDNARGLVLPGYKYLGPGNGLDKGEPVNAADAAALEHDKAYDQQLKAGDNPYLKYNHADAEFQERLKEDTSFGGNLGRAVFQAKKRLLEPLGLVEEAAKTAPGKKRPVEQSPQEPDSSAGIGKSGAQPAKKRLNFGQTGDTESVPDPQPIGEPPAAPSGVGSLTMASGGGAPVADNNEGADGVGSSSGNWHCDSQWLGDRVITTSTRTWALPTYNNHLYKQISNSTSGGSSNDNAYFGYSTPWGYFDFNRFHCHFSPRDWQRLINNNWGFRPKRLNFKLFNIQVKEVTDNNGVKTIANNLTSTVQVFTDSDYQLPYVLGSAHEGCLPPFPADVFMIPQYGYLTLNDGSQAVGRSSFYCLEYFPSQMLRTGNNFQFSYEFENVPFHSSYAHSQSLDRLMNPLIDQYLYYLSKTINGSGQNQQTLKFSVAGPSNMAVQGRNYIPGPSYRQQRVSTTVTQNNNSEFAWPGASSWALNGRNSLMNPGPAMASHKEGEDRFFPLSGSLIFGKQGTGRDNVDADKVMITNEEEIKTTNPVATESYGQVATNHQSAQAQAQTGWVQNQGILPGMVWQDRDVYLQGPIWAKIPHTGGNFHPSPLMGGFGMKHPPPQILIKNTPVPADPPTAFNKDKLNSFITQYSTGQVSVEIEWELQKENSKRWNPEIQYTSNYYKSNNVEFAVNTGGVYSEPRPIGTRYLTRNL

SEQ ID NO: 599 - protein, 736 aa, synthetic construct
  REGION 1..736: note = source = /note="Description of Artificial Sequence: Synthetic polypeptide"
MAADGYLPDWLEDNLSEGIREWWALKPGAPQPKANQQHQDNARGLVLPGYKYLGPGNGLDKGEPVNAADAAALEHDKAYDQQLKAGDNPYLKYNHADAEFQERLKEDTSFGGNLGRAVFQAKKRLLEPLGLVEEAAKTAPGKKRPVEQSPQEPDSSAGIDKSGAQPAKKRLNFGQTGDTESVPDPQPIGEPPAAPSGVGSLTMASGGGAPVADNNEGADGVGSSSGNWHCDSQWLGDRVITTSTRTWALPTYNNHLYKQISNSTSGGSSNDNAYFGYSTPWGYFDFNRFHCHFSPRDWQRLINNNWGFRPKRLNFKLFNIQVKEVTDNNGVKTIANNLTSTVQVFTDSDYQLPYVLGSAHEGCLPPFPADVFMIPQYGYLTLNDGSQAVGRSSFYCLEYFPSQMLRTGNNFQFSYEFENVPFHSSYAHSQSLDRLMNPLIDQYLYYLSKTINGSGQNQQTLKFSVAGPSNMAVQGRNYIPGPSYRQQRVSTTVTQNNNSEFAWPGASSWALNGRNSLMNPGPAMASHKEGEDRFFPLSGSLIFGKQGTGRDNVDADKVMITNEEEIKTTNPVATESYGQVATNHQSAQAQAQTGWVQNQGILPGMVWQDRDVYLQGPIWAKIPHTDGNFHPSPLMGGFGMKHPPPQILIKNTPVPADPPTAFNKDKLNSFITQYSTGQVSVEIEWELQKENSKRWNPEIQYTSNYYKSNNVEFAVNTEGVYSEPRPIGTRYLTRNL

SEQ ID NO: 600 - protein, 736 aa, synthetic construct
  REGION 1..736: note = source = /note="Description of Artificial Sequence: Synthetic polypeptide"
MAADGYLPDWLEDNLSEGIREWWALKPGAPQPKANQQHQDNARGLVLPGYKYLGPGNGLDKGEPVNAADAAALEHDKAYDQQLKAGDNPYLKYNHADAEFQERLKEDTSFGGNLGRAVLQAKKRLLEPLGLVEEAAKTAPGKKRPVEQSPQEPDSSAGIGKSGAQPAKKRLNFGQTGDTESVPDPQPIGEPPAAPSGVGSLTMASGGGAPVADNNEGADGVGSSSGNWHCDSQWLGDRVITTSTRTWALPTYNNHLYKQISNSTSGGSSNDNAYFGYSTPWGYFDFNRFHCHFSPRDWQRLINNNWGFRPKRLNFKLFNIQVKEVTDNNGVKTIANNLTSTVQVFTDSDYQLPYVLGSAHEGCLPPFPADVFMIPQYGYLTLNDGSQAVGRSSFYCLEYFPSQMLRTGNNFQFSYEFENVPFHSSYAHSQSLDRLMNPLIDQYLYYLSKTINGSGQNQQTLKFSVAGSSNMAVQGRNYIPGPSYRQQRVSTTVTQNNNSEFAWPGASSWALNGRNSLMNPGPAMASHKEGEDRFFPLSGSLIFGKQGTGRDNVDADKVMITNEEEIKTTNPVATESYGQVATNHQSAQAQAQTGWVQNQGILPGMVWQDRDVYLQGPIWAKIPHTDGNFHPSPLMGGFGMKHPPPQILIKNTPVPADPPTAFNKDKLNSFITQYSTGQVSVEIEWELQKENSKRWNPEIQYTSNYYKSNNVEFAVNTEGVYSEPRPIGTRYLTRNL

SEQ ID NO: 601 - protein, 736 aa, synthetic construct
  REGION 1..736: note = source = /note="Description of Artificial Sequence: Synthetic polypeptide"
MAADGYLPDWLEDNLSEGIREWWALKPGAPQPKANQQHQDNARGLVLPGYKYLGPGNGLDKGEPVNAADAAALEHDRAYDQQLKAGDNPYLKYNHADAEFQERLKEDTSFGGNLGRAVFQAKKRLLEPLGLVEEAAKTAPGKKRPVEQSPQEPDSSAGIGKSGAQPAKKRLNFGQTGDTESVPDPQPIGEPPAAPSGVGSLTMASGGGAPVADNNEGADGVGSSSGNWHCDSQWLGDRVITTSTRTWALPTYNNHLYKQISNSTSGGSSNDNAYFGYSTPWGYFDFNRFHCHFSPRDWQRLINNNWGFRPKRLNFKLFNIQVKEVTDNNGVKTIANNLTSTVQVFTDSDYQLPYVLGSAHEGCLPPFPADVFMIPQYGYLTLNDGSQAVGRSSFYCLEYFPSQMLRTGNNFQFSYEFENVPFHSSYAHSQSLDRLMNPLIDQYLYYLSKTINGSGQNQQTLKFSVAGPSNMAVQGRNYIPGPSYRQQRVSTTVTQNNNSEFAWPGASSWALNGRNSLMNPGPAMASHKEGEDRFFPLSGSLIFGKQGTGRDNVDADKVMITNEEEIKTTNPVATESYGQVATNHQSAQAQAQTGWVQNQGILPGMVWQDRDVYLQGPIWAKIPHTDGNFHPSPLMGGFGMKHPPPQILIKNTPVPADPPTAFNKDKLNSFITQYSTGQVSVEIEWELQKKNSKRWNPEIQYTSNYYKSNNVEFAVNTEGVYSEPRPIGTRYLTRNL

SEQ ID NO: 602 - protein, 736 aa, synthetic construct
  REGION 1..736: note = source = /note="Description of Artificial Sequence: Synthetic polypeptide"
MAADGYLPDWLEDNLSEGIREWWALKPGAPQPKANQQHQDNARGLVLPGYKYLGPGNGLDKGEPVNAADAAALEHDKAYDQQLKAGDNPYLKYNHADAEFQERLKEDTSFGGNLGRAVFQAKKRLLEPLGLVEEAAKTAPGKKRPVEQSPQEPDSSAGIGKSGAQPAKKRLNFGQTGDTESVPDPQPIGEPPAAPSGVGSLTMASGGGAPVADNNEGADGVGSSSGNWHCDSQWLGDRVITTSTRTWALPTYNNHLYKQISNSTSGGSSNDNAYFGYSTPWGYFDFNRFHCHFSPRDWQRLINNNWGFRPKRLNFKLFNIQVKEVTDNNGVKTIANNLTSTVQVFTDSDYQLPYVLGSAHEGCLPPFPADVFMIPQYGYLTLNDGSQAVGRSSFYCLEYFPSQMLRTGNNFQFSYEFENVPFHSSYAHSQSLDRLMNPLIDQYLYYLSKTINGSGQNQQTLKFSVAGPSNMAVQGRNYIPGPSYRQQRVSTTVTQNNNSEFAWPGASSWALNGRNSLMNPGPAMASHKEGEDRFFPLSGSLIFGKQGTGRDNVDADKVMITNEEEIKTTNPVATESYGQVATNHQSAQARAQTGWVQNQGILPGMVWQDRDVYLQGPIWAKIPHTDGNFHPSPLMGGFGMKHPPPQILIKNTPVPADPPTAFNKDKLNSFITQYSTGQVSVEIEWELQKENSKRWNPEIQYTSNYYKSNNVEFAVNTEGVYSEPRPIGTRYLTRNL

SEQ ID NO: 603 - protein, 736 aa, synthetic construct
  REGION 1..736: note = source = /note="Description of Artificial Sequence: Synthetic polypeptide"
MAADGYLPDWLEDNLSEGIREWWALKPGAPQPKANQQHQDNARGLVLPGYKYLGPGNGLDKGEPVNAVDAAALEHDKAYDQQLKAGDNPYLKYNHADAEFQERLKEDTSFGGNLGRAVFQAKKRLLEPLGLVEEAAKTAPGKKRPVEQSPQEPDSSAGIGKSGAQPAKKRLNFGQTGDTESVPDPQPIGEPPAAPSGVGSLTMASGGGAPVADNNEGADGVGSSSGNWHCDSQWLGDRVITTSTRTWALPTYNNHLYKQISNSTSGGSSNDNAYFGYSTPWGYFDFNRFHCHFSPRDWQRLINNNWGFRPKRLNFKLFNIQVKEVTDNNGVKTIANNLTSTVQVFTDSDYQLPYVLGSAHEGCLPPFPADVFMIPQYGYLTLNDGSQAVGRSSFYCLEYFPSQMLRTGNNFQFSYEFENVPFHSSYAHSQSLDRLMNPLIDQYLYYLSKTINGSGQNQQTLKFSVAGPSNMAVQGRNYIPGPSYRQQRVSTTVTQNNNSEFAWPGASSWALNGRNSLMNPGPAMASHKEGEDRFFPLSGSLIFGKQGTGRDNVDADKVMITNEEEIKTTNPVATESYGQVATNHQSAQAQAQTGWVQNQGILPGMVWQDRDVYLQGPIWAKIPHTDGNFHPSPLMGGFGMKHPPPQILIKNTPVPADPPTAFNKDKLNSFITQYSTGQVSVEIEWELQKENSKRWNPEIQYTSNYYKSNNVEFAVNTEGVYSEPRPIGTRYLTRNL

SEQ ID NO: 604 - protein, 736 aa, synthetic construct
  REGION 1..736: note = source = /note="Description of Artificial Sequence: Synthetic polypeptide"
MAADGYLPDWLEDNLSEGIREWWALKPGAPQPKANQQHQDNARGLVLPGYKYLGPGNGLDKGEPVNAADAAALEHDKAYDQQLKAGDNPYLKYNHADAEFQERLKEDTSFGGNLGRAVFQAKKRLLEPLGLVEEAAKTAPGKKRPVEQSPREPDSSAGIGKSGAQPAKKRLNFGQTGDTESVPDPQPIGEPPAAPSGVGSLTMASGGGAPVADNNEGADGVGSSSGNWHCDSQWLGDRVITTSTRTWALPTYNNHLYKQISNSTSGGSSNDNAYFGYSTPWGYFDFNRFHCHFSPRDWQRLINNNWGFRPKRLNFKLFNIQVKEVTDNNGVKTIANNLTSTVQVFTDSDYQLPYVLGSAHEGCLPPFPADVFMIPQYGYLTLNDGSQAVGRSSFYCLEYFPSQMLRTGNNFQFSYEFENVPFHSSYAHSQSLDRLMNPLIDQYLYYLSKTINGSGQNQQTLKFSVAGPSNMAVQGRNYIPGPSYRQQRVSTTVTQNNNSEFAWPGASSWALNGRNSLMNPGPAMASHKEGEDRFFPLSGSLIFGKQGTGRDNVDADKVMITNEEEIKTTNPVATESYGQVATNHQSAQAQAQTGWVQNQGILPGMVWQDRDVYLQGPIWAKIPHTDGNFHPSPLMGGFGMKHPPPQILIKNTPVPADPPTAFNKDKLNSFITQYSTGQVSVEIEWELQKENSKRWNPEIQYTSNYYKSNNVEFAVNTEGVYSEPRPIGTRYLTRNL

SEQ ID NO: 605 - protein, 736 aa, synthetic construct
  REGION 1..736: note = source = /note="Description of Artificial Sequence: Synthetic polypeptide"
MAADGYLPDWLEDNLSEGIREWWALKPGAPQPKANQQHQDNARGLVLPGYKYLGPGNGLDKGEPVNAADAAALEHDKAYDQQLKAGDNPYLKYNHADAEFQERLKEDTSFGGNLGRAVFQAKKRLLEPLGLVEEAAKTAPGKKRPVEQSPQEPDSSAGIGKSGAQPAKKRLNFGQTGDTESVPDPQPIGEPPAAPSGVGSLTMASCGGAPVADNNEGADGVGSSSGNWHCDSQWLGDRVITTSTRTWALPTYNNHLYKQISNSTSGGSSNDNAYFGYSTPWGYFDFNRFHCHFSPRDWQRLINNNWGFRPKRLNFKLFNIQVKEVTDNNGVKTIANNLTSTVQVFTDSDYQLPYVLGSAHEGCLPPFPADVFMIPQYGYLTLNDGSQAVGRSSFYCLEYFPSQMLRTGNNFQFSYEFENVPFHSSYAHSQSLDRLMNPLIDQYLYYLSKTINGSGQNQQTLKFSVAGPSNMAVQGRNYIPGPSYRQQRVSTTVTQNNNSEFAWPGASSWALNGRNSLMNPGPAMASHKEGEDRFFPLSGSLIFGKQGTGRDNVDADKVMITNEEEIKTTNPVATESYGQVATNHQSAQAQAQTGWVQNQGILPGMVWQDRDVYLQGPIWAKIPHTDGNFHPSPLMGGFGMKHPPPQILIKNTPVPADPPTAFNKDKLNSFITQYSTGQVSVEIEWELQKENSKRWNPEIQYTSNYYKSNNVEFAVNTEGVYSEPRPIGTRYLTRNL

SEQ ID NO: 606 - protein, 736 aa, synthetic construct
  REGION 1..736: note = source = /note="Description of Artificial Sequence: Synthetic polypeptide"
MAADGYLPDWLEDNLSEGIREWWALKPGAPQPKANQQHQDNARGLVLPGYKYLGPGNGLDKGEPINAADAAALEHDKAYDQQLKAGDNPYLKYNHADAEFQERLKEDTSFGGNLGRAVFQAKKRLLEPLGLVEEAAKTAPGKKRPVEQSPQEPDSSAGIGKSGAQPAKKRLNFGQTGDTESVPDPQPIGEPPAAPSGVGSLTMASGGGAPVADNNEGADGVGSSSGNWHCDSQWLGDRVITTSTRTWALPTYNNHLYKQISNSTSGGSSNDNAYFGYSTPWGYFDFNRFHCHFSPRDWQRLINNNWGFRPKRLNFKLFNIQVKEVTDNNGVKTIANNLTSTVQVFTDSDYQLPYVLGSAHEGCLPPFPADVFMIPQYGYLTLNDGSQAVGRSSFYCLEYFPSQMLRTGNNFQFSYEFENVPFHSSYAHSQSLDRLMNPLIDQYLYYLSKTINGSGQNQQTLKFSVAGPSNMAVQGRNYIPGPSYRQQRVSTTVTQNNNSEFAWPGASSWALNGRNSLMNPGPAMASHKEGEDRFFPLSGSLIFGKQGTGRDNVDADKVMITNEEEIKTTNPVATESYGQVATNHQSAQAQAQTGWVQNQGILPGMVWQDRDVYLQGPIWAKIPHTYGNFHPSPLMGGFGMKHPPPQILIKNTPVPADPPTAFNKDKLNSFITQYSTGQVSVEIEWELQKENSKRWNPEIQYTSNYYKSNNVEFAVNTEGVYSEPRPIGTRYLTRNL

SEQ ID NO: 607 - protein, 736 aa, synthetic construct
  REGION 1..736: note = source = /note="Description of Artificial Sequence: Synthetic polypeptide"
MAADGYLPDWLEDNLSEGIREWWALKPGAPQPKANQQHQDNARGLVLPGYKYLGPGNGLDKGEPVNAADAAALEHDKAYDQQLKAGDNPYLKYNHADAEFQERLKEDTSFGGNLGRAVFQAKKRLLEPLGLVEEAAKTAPGKKRPVEQSPQEPDSSAGIGKSGAQPAKKRLNFGQTGDTESVPDPQPIGEPPAAPSGVGSLTMASGGGAPVADNNEGADGVGSSSGNWHCDSQWLGDRVITTSTRTWALPTYNNHLYKQISNSTSGGSSNDNAYFGYSTPWGYFDFNRFHCHFSPHDWQRLINNNWGFRPKRLNFKLFNIQVKEVTDNNGVKTIANNLTSTVQVFTDSDYQLPYVLGSAHEGCLPPFPADVFMIPQYGYLTLNDGSQAVGRSSFYCLEYFPSQMLRTGNNFQFSYEFENVPFHSSYAHSQSLDRLMNPLIDQYLYYLSKTINGSGQNQQTLKFNVAGPSNMAVQGRNYIPGPSYRQQRVSTTVTQNNNSEFAWPRASSWALNGRNSLMNPGPAMASHKEGEDRFFPLSGSLIFGKQGTGRDNVDADKVMITNEEEIKTTNPVATESYGQVATNHQSAQAQAQTGWVQNQGILPGMVWQDRDVYLQGPIWAKIPHTDGNFHPSPLMGGFGMKHPPPQILIKNTPVPADPPTAFNKDKLNSFITQYSTGQVSMEIEWELQKENSKRWNPEIQYTSNYYKSNNVEFAVNTEGVYSEPRPIGTRYLTRNL

SEQ ID NO: 608 - protein, 736 aa, synthetic construct
  REGION 1..736: note = source = /note="Description of Artificial Sequence: Synthetic polypeptide"
MAADGYLPDWLEDNLSEGIREWWALKPGAPQPKANQQHQDNARGLVLPGYKYLGPGNGLDKGEPVNAADAAALEHDKAYDQQLKAGDNPYLKYNHADAEFQERLKEDTSFGGNLGRAVFQAKKRLLEPLGLVEEAAKTAPGKKRPVEQSPQEPDSSAGIGKSGAQPAKKRLNFGQTGDTESVPDPQPIGEPPAAPSGVGSLTMASGGGAPVADNNEGADGVGSSSGNWHCDSQWLGDRVITTSTRTWALPTYNNHLYKQISNSTSGGSSNDNAYFGYSTPWGYFDFNRFHCHFSPRDWQRLINNNWGFRPKRLNFKLFNIQVKEVTDNNGVKTIANNLTSTVQVFTDSDYQLPYVLGSAHEGCLPPFPADVFMIPQYGYLTLNDGSQAVGRSSFYCLEYFPSQMLRTGNNFQFSYEFENVPFHSSYAHSQSLDRLMNPLIDQYLYYLSKTINGSGQNQQTLKFSVAGPSNMAVQGRNYIPGPSYRQQRVSTTVTQNNNSEFAWPRASSWALNGRNSLMNPGPAMASHKEGEDRFFPLSGSLIFGKQGTGRDNVDADKVMITNEEEIKTTNPVATESYGQVATNHQSAQAQAQTGWVQNQGILPGMVWQDRDVYLQGPIWAKIPHTDGNFHPSPLMGGFGMKHPPPQILIKNTPVPADPPTAFNKDKLNSFITQYSTGQVSVEIEWELQKENSKRWNPEIQYTSNYYKSNNVEFAVNTEGVYSEPRPIGTRYLTRNL

SEQ ID NO: 609 - protein, 736 aa, synthetic construct
  REGION 1..736: note = source = /note="Description of Artificial Sequence: Synthetic polypeptide"
MAADGYLPDWLEDNLSEGIREWWALKPGAPQPKANQQHQDNARGLVLPGYKYLGPGNGLDKGEPVNAADAAALEHDKAYDQQLKAGDNPYLKYNHADAEFQERLKEDTSFGGNLGRAVFQAKKRLLEPLGLVEEAAKTAPGKKRPVEQSPQEPDSSAGIGKSGAQPAKKRLNFGQTGDTESVPDPQPIGEPPAAPSGVGSLTMASGGGAPVADNNEGADGVGSSSGNWHCDSQWLGDRVITTSTRTWALPTYNNHLYKQISNSTSGGSSNDNAYFGYSTPWGYFDFNRFHCHFSPRDWQRLINNNWGFRPKRLNFKLFNIQVKEVTDNNGVKTIANNLTSTVQVFTDSDYQLPYVLGSAHEGCLPPFPADVFMIPQYGYLTLNDGSQAVGRSSFYCLEYFPSQMLRTGNNFQFSYEFENVPFHSSYAHSQSLDRLMNPLIDQYLYYLSKTINGSGQNQQTLKFSVAGPSNMAVQGRNYIPGPSYRQQRVSTTVTQNNNSEFAWPRASSWALNGRNSLMNPGPAMASHKEGEDRFFPLSGSLIFGKQGTGRDNVDADKVMITNEEEIKTTNPVATESYGQVATNHQSAQAQAQTGWVQNQGILPGMVWQDRDVYLQGPIWAKIPHTDGNFHPSPLMGGFGMKHPPPQILIKNTPVPADPPTAFNKDKLNSFITQYSTGQVSVEIEWERQKENSKRWNPEIQYTSNYYKSNNVEFAVNTEGVYSEPRPIGTRYLTRNL

SEQ ID NO: 610 - protein, 736 aa, synthetic construct
  REGION 1..736: note = source = /note="Description of Artificial Sequence: Synthetic polypeptide"
MAADGYLPDWLEDNLSEGIREWWALKPGAPQPKANQQHQDNARGLVLPGYKYLGPGNGLDKGEPVNAADAAALEHDKAYDQQLKAGDNPYLKYNHADAEFQERLKEDTSFGGNLGRAVFQAKKRLLEPLGLVEEAAKTAPGKKRPVEQSPQEPDSSAGIGKSGAQPAKKRLNFGQTGDTESVPDPQPIGEPPAAPSGVGSLTMASGGGAPVADNNEGADGVGSSSGNWHCDSQWLGDRVITTSTRTWALPTYNNHLYKQISNSTSGGSSNDNAYFGYSTPWGYFDFNRFHCHFSPRDWQRLINNNWGFRPKRLNFKLFNIQVKEVTDNNGVKTIANNLTSTVQVFADSDYQLPYVLGSAHEGCLPPFPADVFMIPQYGYLTLNDGSQAVGRSSFYCLEYFPSQMLRTGNNFQFSYEFENVPFHSSYAHSQSLDRLMNPLIDQYLYYLSKTINGSGQNQQTLKFSVAGPSNMAVQGRNYIPGPSYRQQRVSTTVTQNNNSEFAWPRASSWALNGRNSLMNPGPAMASHKEGEDRFFPLSGSLIFGKQGTGRDNVDADKVMITNEEEIKTTNPVATESYGQVATNHQSAQAQAQTGWVQNQGILPGMVWQDRDVYLQGPIWAKIPHTDGNFHPSPLMGGFGMKHPPPQILIKNTPVPADPPTAFNKDKLNSFITQYSTGQVSVEIEWELQKENSKRWNPEIQYTSNYYKSNNVEFAVNTEGVYSEPRPIGTRYLTRNL

SEQ ID NO: 611 - protein, 736 aa, synthetic construct
  REGION 1..736: note = source = /note="Description of Artificial Sequence: Synthetic polypeptide"
MAADGYLPDWLEDNLSEGIREWWALKPGAPQPKANQQHQDNARGLVLPGYKYLGPGNGLDKGEPVNAADAAALEHDKAYDQQLKAGDNPYLKYNHADAEFQERLKEDTSFGGNLGRAVFQAKKRLLEPLGLVEEAAKTAPGKKRPVEQSPQEPDSSAGIGKSGAQPAKKRLNFGQTGDTESVPDPQPIGEPPAAPSGVGSLTMASGGGAPVADNNEGADGVGSSSGNWHCDSQWLGDRVITTSTRTWALPTYNNHLYKQISNSTSGGSSNDNAYFGYSTPWGYFDFNRFHCHFSPRDWQRLINNNWGFRPKRLNFKLFNIQVKEVTDNNGVKTIANNLTSTVQVFTDSDYQLPYVLGSAHEGCLPPFPADVFMIPQYGYLTLNDGSQAVGRSSFYCLEYFPSQMLRTGNNFQFSYEFENVPFHSSYAHSQSLDRLMNPLIDQYLYYLSKTINGSGQNQQTLKFSVAGPSNMAVQGRNYIPGPSYRQQRVSTTVTQNNNSEIAWPRASSWALNGRNSLMNPGPAMASHKEGEDRFFPLSGSLIFGKQGTGRDNVDADKVMITNEEEIKTTNPVATESYGQVATNHQSAQAQAQTGWVQNQGILPGMVWQDRDVYLQGPIWAKIPHTDGNFHPSPLMGGFGMKHPPPQILIKNTPVPADPPTAFNKDKLNSFITQYSTGQVSVEIEWELQKENSKRWNPEIQYTSNYCKSNNVEFAVNTEGVYSEPRPIGTRYLTRNL

SEQ ID NO: 612 - protein, 736 aa, synthetic construct; identical to SEQ ID NO: 608
  REGION 1..736: note = source = /note="Description of Artificial Sequence: Synthetic polypeptide"

SEQ ID NO: 613 - DNA, 2208 bp, synthetic construct
  misc_feature 1..2208: note = source = /note="Description of Artificial Sequence: Synthetic polynucleotide"
  source 1..2208: mol_type = other DNA
atggctgccgatggttatcttccagattggctcgaggacaaccttagtgaaggaattcgcgagtggtgggctttgaaacctggagcccctcaacccaaggcaaatcaacaacatcaagacaacgctcgaggtcttgtgcttccgggttacaaataccttggacccggcaacggactcgacaagggggagccggtcaacgcagcagacgcggcggccctcgagcacgacaaggcctacgaccagcagctcaaggccggagacaacccgtacctcaagtacaaccacgccgacgccgagttccaggagcggctcaaagaagatacgtcttttgggggcaacctcgggcgagcagtcttccaggccaaaaagaggcttcttgaacctcttggtctggttgaggaagcggctaagacggctcctggaaagaagaggcctgtagagcagtctcctcaggaaccggactcctccgcgggtattggcaaatcgggtgcacagcccgctaaaaagagactcaatttcggtcagactggcgacacagagtcagtcccagaccctcaaccaatcggagaacctcccgcagccccctcaggtgtgggatctcttacaatggcttcaggtggtggcgcaccagtggcagacaataacgaaggtgccgatggagtgggtagttcctcgggaaattggcattgcgattcccaatggctgggggacagagtcatcaccaccagcacccgaacctgggccctgcccacctacaacaatcacctctacaagcaaatctccaacagcacatctggaggatcttcaaatgacaacgcctacttcggctacagcaccccctgggggtattttgacttcaacagattccactgccacttctcaccacgtgactggcagcgactcatcaacaacaactggggattccggcctaagcgactcaacttcaagctcttcaacattcaggtcaaagaggttacggacaacaatggagtcaagaccatcgccaataaccttaccagcacggtccaggtcttcacggactcagactatcagctcccgtacgtgctcgggtcggctcacgagggctgcctcccgccgttcccagcggacgttttcatgattcctcagtacgggtatctgacgcttaatgatggaagccaggccgtgggtcgttcgtccttttactgcctggaatatttcccgtcgcaaatgctaagaacgggtaacaacttccagttcggctacgagtttgagaacgtacctttccatagcagctacgctcacagccaaagcctggaccgactaatgaatccactcatcgaccaatacttgtactatctctcaaagactattaacggttctggacagaatcaacaaacgctaaaattcagtgtggccggacccagcaacatggctgtccagggaagaaactacatacctggacccagctaccgacaacaacgtgtctcaaccactgtgactcaaaacaacaacagcgaatttgcttggcctggagcttcttcttgggctctcaatggacgtaatagcttgatgaatcctggacctgctatggccagccacaaagaaggagaggaccgtttctttcctttgtctggatctttaatttttggcaaacaaggaactggaagagacaacgtggatgcggacaaagtcatgataaccaacgaagaagaaattaaaactactaacccggtagcaacggagtcctatggacaagtggccacaaaccaccagagtgcccaagcacaggcgcagaccggctgggttcaaaaccaaggaatacttccgggtatggtttggcaggacagagatgtgtacctgcaaggacccatttgggccaaaattcctcacacggacggcaactttcacccttctccgctgatgggagggtttggaatgaagcacccgcctcctcagatcctcatcaaaaacacacctgtacctgcggatcctccaacggccttcaacaaggacaagctgaactctttcatcacccagtattctactggccaagtcagcgtggagatcgagtgggagctgcagaaggaaaacagcaagcgctgggacccggagatccagtacacttccaactattacaagtctaataatgttgaatttgctgttaatactgaaggtgtatatagtgaaccccgccccattggcaccagatacctgactcgtaatctg

SEQ ID NO: 614 - DNA, 2208 bp, synthetic construct
  misc_feature 1..2208: note = source = /note="Description of Artificial Sequence: Synthetic polynucleotide"
  source 1..2208: mol_type = other DNA
atggctgccgatggttatcttccagattggctcgaggacaaccttagtgaaggaattcgcgagtggtgggctttgaaacctggagcccctcaacccaaggcaaatcaacaacatcaagacaacgctcgaggtcttgtgcttccgggttacaaataccttggacccggcaacggactcgacaagggggagccggtcaacgcagcagacgcggcggccctcgagcacgacaaggcctacgaccagcagctcaaggccggagacaacccgtacctcaagtacaaccacgccgacgccgagttccaggagcggctcaaagaagatacgtcttttgggggcaacctcgggcgagcagtcttccaggccaaaaagaggcttcttgaacctcttggtctggttgaggaagcggctaagacggctcctggaaagaagaggcctgtagagcagtctcctcaggaaccggactcctccgcgggtattggcaaatcgggtgcacagcccgctaaaaagagactcaatttcggtcagactggcgacacagagtcagtcccagaccctcaaccaatcggagaacctcccgcagccccctcaggtgtgggatctcttacaatggcttcaggtggtggcgcaccagtggcagacaataacgaaggtgccgatggagtgggtagttcctcgggaaattggcattgcgattcccaatggctgggggacagagtcatcaccaccagcacccgaacctgggccctgcccacctacaacaatcacctctacaagcaaatctccaacagcacatctggaggatcttcaaatgacaacgcctacttcggctacagcaccccctgggggtattttgacttcaacagattccactgccgcttctcaccacgtgactggcagcgactcatcaacaacaactggggattccggcctaagcgactcaacttcaagctcttcaacattcaggtcaaagaggttacggacaacaatggagtcaagaccatcgccaataaccttaccagcacggtccaggtcttcacggactcagactatcagctcccgtacgtgctcgggtcggctcacgagggctgcctcccgccgttcccagcggacgttttcatgattcctcagtacgggtatctgacgcttaatgatggaagccaggccgtgggtcgttcgtccttttactgcctggaatatttcccgtcgcaaatgctaagaacgggtaacaacttccagttcagctacgagtttgagaacgtacctttccatagcagctacgctcacagccaaagcctggaccgactaatgaatccactcatcgaccaatacttgtactatctctcaaagactattaacggttctggacagaatcaacaaacgctaaaattcagtgtggccggacccagcaacatggctgtccagggaagaaactacatacctggacccagctaccgacaacaacgtgtctcaaccactgtgactcaaaacaacaacagcgaatttgcttggcctggagcttcttcttgggctctcaatggacgtaatagcttgatgaatcctggacctgctatggccagccacaaagaaggagaggaccgtttctttcctttgtctggatctttaatttttggcaaacaaggaactggaagagacaacgtggatgcggacaaagtcatgataaccaacgaagaagaaattaaaactactaacccggtagcaacggagtcctatggacaagtggccacaaaccaccagagtgcccaagcacaggcgcagaccggctgggttcaaaaccaaggaatacttccgggtatggtttggcaggacagagatgtgtacctgcaaggacccatttgggccaaaattcctcacacggacggcaactttcacccttctccgctgatgggagggtttggaatgaagcacccgcctcctcagatcctcatcaaaaacgcccctgtacctgcggatcctccaacggccttcaacaaggacaagctgaactctttcatcacccagtattctactggccaagtcagcgtggagatcgagtgggagctgcagaaggaaaacagcaagcgctggaacccggagatccagtacacttccaactattacaagtctaataatgttgaatttgctgttaatactgaaggtgtatatagtgaaccccgccccattggcaccagatacctgactcgtaatctg

SEQ ID NO: 615 - DNA, 2208 bp, synthetic construct
  misc_feature 1..2208: note = source = /note="Description of Artificial Sequence: Synthetic polynucleotide"
  source 1..2208: mol_type = other DNA
atggctgccgatggttatcttccagattggctcgaggacaaccttagtgaaggaattcgcgagtggtgggctttgaaacctggagcccctcaacccaaggcaaatcaacaacatcaagacaacgctcgaggtcttgtgcttccgggttacaaataccttggacccggcaacggactcgacaagggggagccggtcagcgcagcagacgcggcggccctcgagcacgacaaggcctacgaccagcagctcaaggccggagacaacccgtacctcaagtacaaccacgccgacgccgagttccaggagcggctcaaagaagatacgtcttttgggggcaacctcgggcgagcagtcttccaggccaaaaagaggcttcttgaacctcttggtctggttgaggaagcggctaagacggctcctggaaagaagaggcctgtagagcagtctcctcaggaaccggactcctccgcgggtattggcaaatcgggtgcacagcccgctaaaaagagactcaatttcggtcagactggcgacacagagtcagtcccagaccctcaaccaatcggagaacctcccgcagccccctcaggtgtgggatctcttacaatggcttcaggtggtggcgcaccagtggcagacaataacgaaggtgccgatggagtgggtagttcctcgggaaattggcattgcgattcccaatggctgggggacagagtcatcaccaccagcacccgaacctgggccctgcccacctacaacaatcacctctacaagcaaatctccaacagcacatctggaggatcttcaaatgacaacgcctacttcggctacagcaccccctgggggtattttgacttcaacagattccactgccacttctcaccgcgtgactggcagcgactcatcaacaacaactggggattccggcctaagcgactcaacttcaagctcttcaacattcaggtcaaagaggttacggacaacaatggagtcaagaccatcgccaataaccttaccagcacggtccaggtcttcacggactcagactatcagctcccgtacgtgctcgggtcggctcacgagggctgcctcccgccgttcccagcggacgttttcatgattcctcagtacgggtatctgacgcttaatgatggaagccaggccgtgggtcgttcgtccttttactgcctggaatatttcccgtcgcaaatgctaagaacgggtaacaacttccagttcagctacgagtttgagaacgtacctttccatagcagctacgctcacagccaaagcctggaccgactaatgaatccactcatcgaccaatacttgtactatctctcaaagactattaacggttctggacagaatcaacaaacgctaaaattcagtgtggccggacccagcaacatggctgtccagggaagaaactacatacctggacccagctaccgacaacaacgtgtctcaaccactgtgactcaaaacaacaacagcgaatttgcttggcctggagcttcttcttgggctctcaatggacgtaatagcttgatgaatcctggacctgctatggccagccacaaagaaggagaggaccgtttctttcctttgtctggatctttaatttttggcaaacaaggaactggaagagacaacgtggatgcggacaaagtcatgataaccaacgaagaagaaattaaaactactaacccggtagcaacggagtcctatggacaagtggccacaaaccaccagagtgcccaagcacaggcgcagaccggctgggttcaaaaccaaggaatacttccgggtatggtttggcaggacagagatgtgtacctgcaaggacccatttgggccaaaattcctcacacggacggcaactttcacccttctccgctgatgggagggtttggaatgaagcacccgcctcctcagatcctcatcaaaaacacacctgtacctgcggatcctccaacggccttcaacaaggacaagctgaactctttcatcacccagtattctactggccaagtcagcgtggagatcgagtgggagctgcagaaggaaaacagcaagcgctggaacccggagatccagtacacttccaactattacaagtctaataatgttgaatttgctgttaatactgaaggtgtatatagtgaaccccgccccattggcaccagatacctgactcgtaatctg

SEQ ID NO: 616 - DNA, 2208 bp, synthetic construct
  misc_feature 1..2208: note = source = /note="Description of Artificial Sequence: Synthetic polynucleotide"
  source 1..2208: mol_type = other DNA
atggctgccgatggttatcttccagattggctcgaggacaaccttagtgaaggaattcgcgagtggtgggctttgaaacctggagcccctcaacccaaggcaaatcaacaacatcaagacaacgctcgaggtcttgtgcttccgggttacaaataccttggacccggcaacggactcgacaagggggagccggtcaacgcagcagacgcggcggccctcgagcacgacaaggcctacgaccagcagctcaaggccggagacaacccgtacctcaagtacaaccacgccgacgccgagttccaggagcggctcaaagaagatacgtcttttgggggcaacctcgggcgagcagtcttccaggccaaaaagaggcttcttgaacctcttggtctggttgaggaagcggctaagacggctcctggaaagaagaggcctgtagagcagtctcctcaggaaccggactcctccgcgggtattggcaaatcgggtgcacagcccgctaaaaagagactcaatttcggtcagactggcgacacagagtcagtcccagaccctcaaccaatcggagaacctcccgcagccccctcaggtgtgggatctcttacaatggcttcaggtggtggcgcaccagtggcagacaataacgaaggtgccgatggagtgggtagttcctcgggaaattggcattgcgattcccaatggctgggggacagagtcatcaccaccagcacccgaacctgggccctgcccacctacaacaatcacctctacaagcaaatctccaacagcacatctggaggatcttcaaatgacaacgcctacttcggctacagcaccccctgggggtattttgacttcaacagattccactgccacttctcaccacgtgactggcagcgactcatcaacaacaactggggattccggcctaagcgactcaacttcaagctcttcaacattcaggtcaaagaggttacggacaacaatggagtcaagaccatcgccaataaccttaccagcacggtccaggtcttcacggactcagactatcagctcccgtacgtgctcgggtcggctcacgagggctgcctcccgccgttcccagcggacgttttcatgattcctcagtacgggtatctgacgcttaatgatggaagccaggccgtgggtcgttcgtccttttactgcctggaatatttcccgtcgcaaatgctaagaacgggtaacaacttccagttcagctacgagtttgagaacgtacctttccatagcagctacgctcacagccaaagcctggaccgactaatgaatccactcatcgaccaatacttgtactatctctcaaagactattaacggttctggacagaatcaacaaacgctaaaattcagtgtggccggacccagcaacacggctgtccagggaagaaactacatacctggacccagctaccgacaacaacgtgtctcaaccactgtgactcaaaacaacaacagcgaatttgcttggcctggagcttcttcttgggctctcaatggacgtaatagcttgatgaatcctggacctgctatggccagccacaaagaaggagaggaccgtttctttcctttgtctggatctttaatttttggcaaacaaggaactggaagagacaacgtggatgcggacaaagtcatgataaccaacgaagaagaaattaaaactactaacccggtagcaacggagtcctatggacaagtggccacaaaccaccagagtgcccaagcacaggcgcagaccggctgggttcaaaaccaaggaatacttccgggtatggtttggcaggacagagatgtgtacctgcaaggacccatttgggccaaaattcctcacacggacggcaactttcacccttctccgctgatgggagggtttggaatgaagcacccgcctcctcagatcctcatcaaaaacacacctgtacctgcggatcctccaacggccttcaacaaggacaagctgaactctttcatcacccagtattctactggccaagtcagcgtggagatcgagtgggagctgcagaaggaaaacagcaagcgctggaacccggagatccagtacacttccaactattacaagtctaataatgttgaatttgctgttaatactgaaggtgtatatagtgaaccccgccccattggcaccagatacctgactcgtaatctg

SEQ ID NO: 617 - DNA, 2208 bp, synthetic construct
  misc_feature 1..2208: note = source = /note="Description of Artificial Sequence: Synthetic polynucleotide"
  source 1..2208: mol_type = other DNA
atggctgccgatggttatcttccagattggctcgaggacaaccttagtgaaggaattcgcgagtggtgggctttgaaacctggagcccctcaacccaaggcaaatcaacaacatcaagacaacgctcgaggtcttgtgcttccgggttacaaataccttggacccggcaacggactcgacaagggggagccggtcaacgcagcagacgcggcggccctcgagcacgacaaggcctacgaccagcagctcaaggccggagacaacccgtacctcaagtacaaccacgccgacgccgagttccaggagcggctcaaagaagatacgtcttttgggggcaacctcgggcgagcagtcttccaggccaaaaagaggcttcttgaacctcttggtctggttgaggaagcggctaagacggctcctggaaagaagaggcctgtagagcagtctcctcaggaaccggactcctccgcgggtattggcaaatcgggtgcacagcccgctaaaaagagactcaatttcggtcagactggcgacacagagtcagtcccagaccctcaaccaatcggagaacctcccgcagccccctcaggtgtgggatctcttacaatggcttcaggtggtggcgcaccagtggcagacaataacgaaggtgccgatggagtgggtagttcctcgggaaattggcattgcgattcccaatggctgggggacagagtcatcaccaccagcacccgaacctgggccctgcccacctacaacaatcacctctacaagcaaatctccaacagcacatctggaggatcttcaaatgacaacgcctacttcggctacagcaccccctgggggtattttgacttcaacagattccactgccacttctcaccacgtgactggcagcgactcatcaacaacaactggggattccggcctaagcggctcaacttcaagctcttcaacattcaggtcaaagaggttacggacaacaatggagtcaagaccatcgccaataaccttaccagcacggtccaggtcttcacggactcagactatcagctcccgtacgtgctcgggtcggctcacgagggctgcctcccgccgttcccagcggacgttttcatgattcctcagtacgggtatctgacgcttaatgatggaagccaggccgtgggtcgttcgtccttttactgcctggaatatttcccgtcgcaaatgctaagaacgggtagcaacttccagttcagctacgagtttgagaacgtacctttccatagcagctacgctcacagccaaagcctggaccgactaatgaatccactcatcgaccaatacttgtactatctctcaaagactattaacggttctggacagaatcaacaaacgctaaaattcagtgtggccggacccagcaacatggctgtccagggaagaaactacatacctggacccagctaccgacaacaacgtgtctcaaccactgtgactcaaaacaacaacagcgaatttgcttggcctggagcttcttcttgggctctcaatggacgtaatagcttgatgaatcctggacctgctatggccagccacaaagaaggagaggaccgtttctttcctttgtctggatctttaatttttggcaaacaaggaactggaagagacaacgtggatgcggacaaagtcatgataaccaacgaagaagaaattaaaactactaacccggcagcaacggagtcctatggacaagtggccacaaaccaccagagtgcccaagcacaggcgcagaccggctgggttcaaaaccaaggaatacttccgggtatggtttggcaggacagagatgtgtacctgcaaggacccatttgggccaaaattcctcacacggacggcaactttcacccttctccgctgatgggagggtttggaatgaagcacccgcctcctcagatcctcatcaaaaacacacctgtacctgcggatcctccaacggccttcaacaaggacaagctgaactctttcatcacccagtattctactggccaagtcagcgtggagatcgagtgggagctgcagaaggaaaacagcaagcgctggaacccggagatccagcacacttccaactattacaagtctaataatgttgaatttgctgttaatactgaaggtgtatatagtgaaccccgccccattggcaccagatacctgactcgtaatctg

SEQ ID NO: 618 - DNA, 2208 bp, synthetic construct
  misc_feature 1..2208: note = source = /note="Description of Artificial Sequence: Synthetic polynucleotide"
  source 1..2208: mol_type = other DNA
atggctgccgatggttatcttccagattggctcgaggacaaccttagtgaaggaattcgcgagtggtgggctttgaaacctggagcccctcaacccaaggcaaatcaacaacatcaagacaacgctcgaggtcttgtgcttccgggttacaaataccttggacccggcaacggactcgacaagggggagccggtcaacgcagcagacgcggcggccctcgagcacgacaaggcctacgaccagcagctcaaggccggagacaacccgtacctcaagtacaaccacgccgacgccgagttccaggagcggctcaaagaagatacgtcttttgggggcaacctcgggcgagcagtcttccaggccaaaaagaggcttcttgaacctcttggtctggttgaggaagcggctaagacggctcctggaaagaagaggcctgtagagcagtctcctcaggaaccggactcctccgcgggtattggcaaatcgggtgcacagcccgctaaaaagagactcaatttcggtcagactggcgacacagagtcagtcccagaccctcaaccaatcggagaacctcccgcagccccctcaggtgtgggatctcttacaatggcttcaggtggtggcgcaccagtggcagacaataacgaaggtgccgatggagtgggtagttcctcgggaaattggcattgcgattcccaatggctgggggacagagtcatcaccaccagcacccgaacctgggccctgcccacctacaacaatcacctctacaagcaaatctccaacagcacatctggaggatcttcaaatgacaacgcctacttcggctacagcaccccctgggggtattttgacttcaacagattccactgccacttctcaccacgtgactggcagcgactcatcaacaacaactggggattccggcctaagcgactcaacttcaggctcttcaacattcaggtcaaagaggttacggacaacaatggagtcaagaccatcgccaataaccttaccagcacggtccaggtcttcacggactcagactatcagctcccgtacgtgctcgggtcggctcacgagggctgcctcccgccgttcccagcggacgttttcatgattcctcagtacgggtatctgacgcttaatgatggaagccaggccgtgggtcgttcgtccttttactgcctggaatatttcccgtcgcaaatgctaagaacgggtaacaacttccagttcagctacgagtttgagaacgtacctttccatagcagctacgctcacagccaaagcctggaccgactaatgaatccactcatcgaccaatacttgtactatctctcaaagactattaacggttctggacagaatcaacaaacgctaaaattcagtgtggccggacccagcaacatggctgtccagggaagaaactacatacctggacccagctaccgacaacaacgtgtctcaaccactgtgactcaaaacaacaacagcgaatttgcttggcctggagcttcttcttgggctctcaatggacgtaatagcttgatgaatcctggacctgctatggccagccacaaagaaggagaggaccgtttctttcctttgtctggatctttaatttttggcaaacaaggaactggaagagacaacgtggatgcggacaaagtcatgataaccaacgaagaagaaattaaaactactaacccggtagcaacggagtcctatggacaagtggccacaaaccaccagagtgcccaagcacaggcgcagaccggctgggttcaaagccaaggaatacttccgggtatggtttggcaggacagagatgtgtacctgcaaggacccatttgggccaaaattcctcacacggacggcaactttcacccttctccgctgatgggagggtttggaatgaagcacccgcctccccagatcctcatcaaaaacacacctgtacctgcggatcctccaacggccttcaacaaggacaagctgaactctttcatcacccagtattctactggccaagtcagcgtggagatcgagtgggagctgcagaaggaaaacagcaagcgctggaacccggagatccagtacacttccaactattacaagtctaataatgttgaatttgctgttaatactgaaggtgtatatagtgaaccccgccccattggcaccagatacctgactcgtaatctg

SEQ ID NO: 619 - DNA, 2205 bp, synthetic construct
  misc_feature 1..2205: note = source = /note="Description of Artificial Sequence: Synthetic polynucleotide"
  source 1..2205: mol_type = other DNA
atggctgccgatggttatcttccagattggctcgaggacaaccttagtgaaggaattcgcgagtggtgggctttgaaacctggagcccctcaacccaaggcaaatcaacaacatcaagacaacgcccgaggtcttgtgcttccgggttacaaataccttggacccggcaacggactcgacaagggggagccggtcaacgcagcagacgcggcggccctcgagcacgacaaggcctacgaccagcagctcaaggccggagacaacccgtacctcaagtacaaccacgccgacgccgagttccaggagcggctcaaagaagatacgtcttttgggggcaacctcgggcgagcagtcttccaggccaaaaagaggcttcttgaacctcttggtctggttgaggaagcggctaagacggctcctggaaagaagaggcctgtagagcagtctcctcaggaaccggactcctccgcgggtattggcaaatcgggtgcacagcccgctaaaaagagactcaatttcggtcagactggcgacacagagtcagtcccagaccctcaaccaatcggagaacctcccgcagccccctcaggtgtgggatctcttacaatggcttcaggtggtggcgcaccagtggcagacaataacgaaggtgccgatggagtgggtagttcctcgggaaattggcattgcgattcccaatggctgggggacagagtcatcaccaccagcacccgaacctgggccctgcccacctacaacaatcacctctacaagcaaatctccaacagcacatctggaggatcttcaaatgacaacgcctacttcggctacagcaccccctggaggtattttgacttcaacagattccactgccacttctcaccacgtgactggcagcgactcatcaacaactggggattccggcctaagcgactcaacttcaagctcttcaacattcaggtcaaagaggttacggacaacaatggagtcaagaccatcgccaataaccttaccagcacggtccaggccttcacggactcagactatcagctcccgtacgtgctcgggtcggctcacgagggctgcctcccgccgttcccagcggacgttttcatgattcctcagtacgggtatctgacgcttaatgatggaagccaggccgtgggtcgttcgtccttttactgcctggaatatttcccgtcgcaaatgctaagaacgggtaacaacttccagttcagctacgagtttgagaacgtacctttccatagcagctacgctcacagccaaagcctggaccgactaatgaatccactcatcgaccaatacttgtactatctctcaaagactattaacggttctggacagaatcaacaaacgctaaaattcagtgtggccggacccagcaacatggctgtccagggaagaaactacatacctggacccagctaccgacaacaacgtgtctcaaccactgtgactcaaaacaacaacagcgaatttgcttggcctggagcttcttcttgggctctcaatggacgtaatagcttgatgaatcctggacctgctatggccagccacaaagaaggagaggaccgtttctttcctttgtctggatctttaatttttggcaaacaaggaactggaagagacaacgtggatgcggacaaagtcatgataaccaacgaagaagaaattaaaactactaacccggtagcaacggagtcctatggacaagtggccacaaaccaccagagtgcccaagcacaggcgcagaccggctgggttcaaaaccaaggaatacttccgggtatggtttggcaggacagagatgtgtacctgcaaggacccatttgggccaaaattcctcacacggacggcaactttcacccttctccgctgatgggagggtttggaatgaagcacccgcctcctcagatcctcatcaaaaacacacctgtacctgcggatcctccaacggccttcaacaaggacgagctgaactctttcatcacccagtattctactggccaagtcagcgtggagatcgagtgggagctgcagaaggaaaacagcaagcgctggaacccggagatccagtacacttccaactattacaagtctaataatgttgaatttgctgttaatactgaaggtgtatatagtgaaccccgccccattggcaccagatacctgactcgtaatctg

SEQ ID NO: 620 - DNA, 2205 bp, synthetic construct
  misc_feature 1..2205: note = source = /note="Description of Artificial Sequence: Synthetic polynucleotide"
  source 1..2205: mol_type = other DNA
atggctgccgatggttatcttccagattggctcgaggacaaccttagtgaaggaattcgcgagtggtgggctttgaaacctggagcccctcaacccaaggcaaatcaacaacatcaagacaacgctcgaggtcttgtgcttccgggttacaaataccttggacccggcaacggactcgacaagggggagccggtcaacgcagcagacgcggcggccctcgagcacgacaaggcctacgaccagcagctcaaggccggagacaacccgtacctcaagtacaaccacgccgacgccgagttccaggagcggctcaaagaagatacgtcttttgggggcaacctcgggcgagcagtcttccaggacaaaaagaggcttcttgaacctcttggtctggttgaggaagcggctaagacggctcctggaaagaagaggcctgtagagcagtctcctcaggaaccggactcctccgcgggtattggcaaatcgggtgcacagcccgctaaaaagagactcaatttcggtcagactggcgacacagagtcagtcccagaccctcaaccaatcggagaacctcccgcagccccctcaggtgtgggatctcttacaatggcttcaggtggtggcgcaccagtggcagacaataacgaaggtgccgatggagtgggtagttcctcgggaaattggcattgcgattcccaatggctgggggacagagtcatcaccaccagcacccgaacctgggccctgcccacctacaacaatcacctctacaagcaaatctccaacagcacatctggaggatcttcaaatgacaacgcctacttcggctacagcaccccctgggggtattttgacttcaacagattccactgccacttctcaccacgtgactggcagcgactcatcaacaactggggattccggcctaagcgactcaacttcaagctcttcaacattcaggtcaaagaggttacggacaacaatggagtcaagaccatcgccaataaccttaccagcacggtccaggtcttcacggactcagactatcagctcccgtacgtgctcgggtcggctcacgagggctgcctcccgccgttcccagcggacgttttcatgattcctcagtacgggtatctgacgcttaatgatggaagccaggccgtgggtcgttcgtccttttactgcctggaatatttcccgtcgcaaatgctaagaacgggtaacaacttccaattcagctacgagtttgagaacgtacctttccatagcagctacgctcacagccaaagcctggaccgactaatgaatccactcatcgaccaatacttgtactatctctcaaagactattaacggttctggacagaatcaacaaacgctaaaattcagtgtggccggacccagcaacatggctgtccagggaagaaactacatacctggacccagctaccgacaacaacgtgtctcaaccactgtgactcaaaacaacaacagcgaatttgcttggcctggagcttcttcttgggctctcaatggacgtaatagcttgatgaatcctggacctgctatggccagccacaaagaaggagaggaccgtttctttcctttgtctggatctttaatttttggcaaacaaggaactggaagagacaacgtggatgcggacaaagtcatgataaccaacgaagaagaaattaaaactactaacccggtagcaacggagtcctatggacaagtggccacaaaccaccagagtgcccaagcacaggcgcagaccggctgggttcaaaaccaaggaatacttccgggtatggtttggcaggacagagatgtgtacctgcaaggacccatttgggccaaaattcctcacacggacggcaactttcacccttctccgctgatgggagggtttggaatgaagcacccgcctcctcagatcctcatcaaaaacacacctgtacctgcggatcctccaacggccttcaacaaggacaagctgaactctttcatcacccagtattctactggccaagtcagcgtggagatcgagtgggagctgcagaaggaaaacagcaagcgctggaacccggagatccagtacacttccaactattacaagtctaataatgttgaatttgctgttaatactgaaggtgtatatagtgaaccccgccccattggcaccagatacctgactcgtaatctg

SEQ ID NO: 621 - DNA, 2208 bp, synthetic construct
  misc_feature 1..2208: note = source = /note="Description of Artificial Sequence: Synthetic polynucleotide"
  source 1..2208: mol_type = other DNA
atggctgccgatggttatcttccagattggctcgaggacaaccttagtgaaggaattcgcgagtggtgggctttgaaacctggagcccctcaacccaaggcaaatcaacaacatcaagacaacgctcgaggtcttgtgcttccgggttacaaataccttggacccggcaacggactcgacaagggggagccggtcaacgcagcagacgcggcggccctcgagcacgacaaggcctacgaccagcagctcaaggccggagacaacccgtacctcaagtacaaccacgccgacgccgagttccaggagcggctcaaagaagatacgtcttttgggggcaacctcgggcgagcagtcttccaggccaaaaagaggcttcttgaacctcttggtctggttgaggaagcggctaagacggctcctggaaagaagaggcctgtagagcagtctcctcaggaaccggactcctccgcgggtattggcaaatcgggtgcacagcccgctaaaaagagactcaatttcggtcagactggcgacacagagtcagtcccagaccctcaaccaatcggagaacctcccgcagccccctcaggtgtgggatctcttacaatggcttcaggtggtggcgcaccagtggcagacaataacgaaggtgccgatggagtgggtagttcctcgggaaattggcattgcgattcccaatggctgggggacagagccatcaccaccagcacccgaacctgggccctgcccacctacaacaatcacctctacaagcaaatctccaacagcacatctggaggatcttcaaatgacaacgcctacttcggctacagcaccccctgggggtattttgacttcaacagattccactgccacttctcaccacgtgactggcagcggctcatcaacaacaactggggattccggcctaagcgactcaacttcaagctcttcaacattcaggtcaaagaggttacggacaacaatggagtcaagaccatcgccaataaccttaccagcacggtccaggtcttcacggactcagactatcagctcccgtacgtgctcgggtcggctcacgagggctgcctcccgccgttcccagcggacgttttcatgattcctcagtacgggtatctgacgcttaatgatggaagccaggccgtgggtcgttcgtccttttactgcctggaatatttcccgtcgcaaatgctaagaacgggtaacaacttccagttcagctacgagtttgagaacgtacctttccatagcagctacgctcacagccaaagcctggaccgactaatgaatccactcatcgaccaatacttgtactatctctcaaagactattaacggttctggacagaatcaacaaacgctaaaattcagtgtggccggacccagcaacatggctgtccagggaagaaactacatacctggacccagctaccgacaacaacgtgtctcaaccactgtgactcaaaacaacaacagcgaatttgcttggcctggagcttcttcttgggctctcaatggacgtaatagcttgatgaatcctggacctgctatggccagccacaaagaaggagaggaccgtttctttcctttgtctggatctttaatttttggcaaacaaggaactggaagagacaacgtggatgcggacaaagtcatgacaaccaacgaagaagaaattaaaactactaacccggtagcaacggagtcctatggacaagtggccacaaaccaccagagtgcccaagcacaggcgcagaccggctgggttcaaaaccaaggaatacttccgggtatggtttggcaggacagagatgtgtacctgcaaggacccatttgggccaaaattcctcacacggacggcaactttcacccttctccgctgatgggagggtttggaatgaagcacccgcctcctcagatcctcatcaaaaacacacctgtacctgcggatcctccaacggccttcaacaaggacaagctgaactctttcatcacccagtattctactggccaagtcagcgtggagatcgagtgggagctgcagaaggaaaacagcaagcgctggaacccggagatccagtacacttccaactattacaagtctaataatgttgaatttgctgttaatactgaaggtgtatatagtgaaccccgccccattggcaccagatacctgactcgtaatctg

SEQ ID NO: 622 - DNA, 2208 bp, synthetic construct
  misc_feature 1..2208: note = source = /note="Description of Artificial Sequence: Synthetic polynucleotide"
  source 1..2208: mol_type = other DNA
atggctgccgatggttatcttccagattggctcgaggacaaccttagtgaaggaattcgcgagtggtgggctttgaaacctggagcccctcaacccaaggcaaatcaacaacatcaagacaacgctcgaggtcttgtgcttccgggttacaaataccttggacccggcaacggactcgacaagggggagccggtcaatgcagcagacgcggcggccctcgagcacgacaaggcctacgaccagcagctcaaggccggagacaacccgtacctcaagtacaaccacgccgacgccgagttccaggagcggctcaaagaagatacgtcttttgggggcaacctcgggcgagcagtcttccagaccaaaaagaggcttcttgaacctcttggtctggttgaggaagcggctaagacggctcctggaaagaagaggcctgtagagcagtctcctcaggaaccgggctcctccgcgggtattggcaaatcgggtgcacagcccgctaaaaagagactcaatttcggtcagactggcgacacagagtcagtcccagaccctcaaccaatcggagaacctcccgcagccccctcaggtgtgggatctcttacaatggcttcaggtggtggcgcaccagtggcagacaataacgaaggtgccgatggagtgggtagttcctcgggaaattggcattgcgattcccaatggctgggggacagagtcatcaccaccagcacccgaacctgggccctgcccacctacaacaatcacctctacaagcaaatctccaacagcacatctggaggatcttcaaatgacaacgcctacttcggctacagcaccccctgggggtattttgacttcaacagattccactgccacttctcaccacgtgactggcagcgactcatcaacaacaactggggattccggcctaagcgactcaacttcaagctcttcaacattcaggtcaaagaggttacggacaacaatggagtcaagaccatcgccaataaccttaccagcacggtccaggtcttcacggactcagactatcagctcccgtacgtgctcgggtcggctcacgagggctgcctcccgccgttcccagcggacgttttcatgattcctcagtacgggtatctgacgcttaatgatggaagccaggccgtgggtcgttcgtccttttactgcctggaatatttcccgtcgcaaatgctaagaacgggtaacaacttccagttcagctacgagtttgagaacgtacctttccatagcagctacgctcacagccaaagcctggaccgactaatgaatccactcatcgaccaatacttgcactatctctcaaagactattaacggttctggacagaatcaacaaacgctaaaattcagtgtggccggacccagcaacatggctgtccagggaagaaactacatacctggacccagctaccgacaacaacgtgtctcaaccactgtgactcaaaacaacaacagcgaatttgcttggcctggagcttcttcttgggctctcaatggacgtaatagcttgatgaatcctggacctgctatggccagccacaaagaaggagaggaccgtttctttcctttgtctggatctttaatttttggcaaacaaggaactggaagagacaacgtggatgcggacaaagtcatgataaccaacgaagaagaaattaaaactactaacccggtagcaacggagtcctatggacaagtggccacaaaccaccagagtgcccaagcacaggcgcagaccggctgggttcaaaaccaaggaatacttccgggtatggtttggcaggacagagatgtgtacctgcaaggacccatttgggccaaaattcctcacacggacggcaactttcacccttctccgctgatgggagggtttggaatgaagcacccgcctcctcagatcctcatcaaaaacacacctgtacctgcggatcctccaacggccttcaacaaggacaagctgaactctttcatcacccagtattctactggccaagtcagcgtggagatcgagtgggagctgcagaaggaaaacagcaagcgctggaacccggagatccagtacacttccaactattacaagtctaataatgttgaatttgctgttaatactgaaggtgtatatagtgaaccccgccccattggcaccagatacctgactcgtaatctg

SEQ ID NO: 623 - DNA, 2208 bp, synthetic construct
  misc_feature 1..2208: note = source = /note="Description of Artificial Sequence: Synthetic polynucleotide"
  source 1..2208: mol_type = other DNA
atggctgccgatggttattttccagattggctcgaggacaaccttagtgaaggaattcgcgagtggtgggctttgaaacctggagcccctcaacccaaggcaaatcaacaacatcaagacaacgctcgaggtcttgtgcttccgggttacaaataccttggacccggcaacggactcgacaagggggagccggtcaacgcagcagacgcggcggccctcgagcacgacaaggcctacgaccagcagctcaaggccggagacaacccgtacctcaagtacaaccacgccgacgccgagttccaggagcggctcaaagaagatacgtcttttgggggcaacctcgggcgagcagtcttccaggccaaaaagaggcttcttgaacctcttggtctggttgaggaagcggctaagacggctcctggaaagaagaggcctgtagagcagtctcctcaggaaccggactcctccgcgggtattggcaaatcgggtgcacagcccgctaaaaagagactcaatttcggtcagactggcgacacagagtcagtcccagaccctcaaccaatcggagaatctcccgcagccccctcaggtgtgggatctcttacaatggcttcaggtggtggcgcaccagtggcagacaataacgaaggtgccgatggagtgggtagttcctcgggaaattggcattgcgattcccaatggctgggggacagagtcatcaccaccagcacccgaacctgggccctgcccacctacaacaatcacctctacaagcaaatctccaacagcacatctggaggatcttcaaatgacaacgcctacttcggctacagcaccccctgggggtattttgacttcaacagattccactgccacttctcaccacgtgactggcagcgactcatcaacaacaactggggattccggcctaagcgactcaacttcaagctcttcaacattcaggtcaaagaggttacggacaacaatggagtcaagaccatcgccaataaccttaccagcacggtccaggtcttcacggactcagactatcagctcccgtacgtgctcgggtcggctcacgagggctgcctcccgccgttcccagcggacgttttcatgattcctcagtacgggtatctgacgcttaatgatggaagccaggccgtgggtcgttcgtccttttactgcctggaatatctcccgtcgcaaatgctaagaacgggtaacaacttccagttcagctacgagtttgagaacgtacctttccatagcagctacgctcacagccaaagcctggaccgactaatgaatccactcatcgaccaatacttgcactatctctcaaagactattaacggttctggacagaatcaacaaacgctaaaattcagtgtggccggacccagcaacatggctgtccagggaagaaactacatacctggacccagctaccgacaacaacgtgtctcaaccactgtgactcaaaacaacaacagcgaatttgcttggcctggagcttcttcttgggctctcaatggacgtaatagcttgatgaatcctggacctgctgtggccagccacaaagaaggagaggaccgtttctttcctttgtctggatctttaatttttggcaaacaaggaactggaagagacaacgtggatgcggacaaagtcatgataaccaacgaagaagaaattaaaactactaacccggtagcaacggagtcctatggacaagtggccacaaaccaccagagtgcccaagcacaggcgcagaccggctgggttcaaaaccaaggaatacttccgggtatggtttggcaggacagagatgtgtacctgcaaggacccatttgggccaaaattcctcacacggacggcaactttcacccttctccgctgatgggagggtttggaatgaagcacccgcctcctcagatcctcatcaaaaacacacctgtacctgcggatcctccaacggccttcaacaaggacaagctgaactctttcatcacccagtattctactggccaagtcagcgtggagatcgagtgggagctgcagaaggaaaacagcaagcgctggaacccggagatccagtacacttccaactattacaagtctaataatgttgaatttgctgttaatactgaaggtgtatatagtgaaccccgccccattggcaccagatacctgactcgtaatctg

SEQ ID NO: 624 - DNA, 2208 bp, synthetic construct
  misc_feature 1..2208: note = source = /note="Description of Artificial Sequence: Synthetic polynucleotide"
  source 1..2208: mol_type = other DNA
atggctgccgatggttatcttccagattggctcgaggacaaccttagtgaaggaattcgcgagtggtgggctttgaaacctggagcccctcaacccaaggcaaatcaacaacatcaagacaacgctcgaggtcttgtgcttccgggttacaaataccttggacccggcaacggactcgacaagggggagccggtcaacgcagcagacgcggcggccctcgagcacgacaaggcctacgaccagcagctcaaggccggagacaacccgtacctcaagtacaaccacgccgacgccgagttccaggagcggctcaaagaagatacgtcttttgggggcaacctcgggcgagcagtcttccaggccaaaaagaggcttcttgaacctcttggtccggttgaggaagcggctaagacggctcctggaaagaagaggcctgtagagcagtctcctcaggaaccggactcctccgcgggtattggcaaatcgggtgcacagcccgctaaaaagagactcaatttcggtcagactggcgacacagagtcagtcccagaccctcaaccaatcggagaacctcccgcagccccctcaggtgtgggatctcttacaatggcttcaggtggtggcgcaccagtggcagacaataacgaaggtgccgatggagtgggtagttcctcgggaaattggcattgcgattcccaatggctgggggacagagtcatcaccaccagcacccgaacctgggccctgcccacctacaacaatcacctctacaagcaaatctccaacagcacatctggaggatcttcaaatgacaacgcctacttcggctacagcaccccctgggggtattttgacttcaacagattccactgccacttctcaccacgtgactggcagcgactcatcaacaacaactggggattccggcctaagcgactcaacttcaagctcttcaacattcaggtcaaagaggttacggacaacaatggagtcaagaccatcgccaataaccttaccagcacggtccaggtcttcacggactcagactatcagctcccgtacgtgctcgggtcggctcacgagggctgcctcccgccgttcccagcggacgttttcatgattcctcagtacgggtatctgacgcttaatgatggaagccaggccgtgggtcgttcgtccttttactgcctggaatatttcccgtcgcaaatgctaagaacgggtaacaacttccagttcagctacgagtttgagaacgtacctttccatagcagctacgctcacagccaaagcctggaccgactaatgaatccactcatcgaccaatacttgtactatctctcaaagactattaacggttctggacagaatcaacaaacgctaaaattcagtgtggccggacccagcaacatggctgtccagggaagaaactacatacctggacccagctaccgacaacaacgtgtctcaaccactgtgactcaaaacaacaacagcgaatttgcttggcctggagcttcttcttgggctctcaatggacgtaatagcttgatgaatcctggacctgctatggccagccacaaagaaggagaggaccgtttctttcctttgtctggatctttaatttttggcaaacaaggaactggaagagacaacgtggatgcggacaaagtcatgataaccaacgaagaagaaattaaaactactaacccggtagcaacggagtcctatggacaagcggccacaaaccaccagagtgcccaagcacaggcgcagaccggctgggttcaaaaccaaggaatacttccgggtatggtttggcaggacagagatgtgtacctgcaaggacccatttgggccaaaattcctcacacggacggcaactttcacccttctccgctgatgggagggtttggaatgaagcacccgcctcctcagatcctcatcaaaaacacacctgtacctgcggatcctccaacggccttcaacaaggacaagctgaactctttcatcacccagtattctactggccaagtcagcgtggagatcgagtgggagctgcagaaggaaaacagcaagcgctggaacccggagatccagtacacttccaactattacaagtctaataatgttgaatttgctgttaatactgaaggtgtatatagtgaaccccgccccattggcaccagatacctgactcgtaatctg

SEQ ID NO: 625 - DNA, 2208 bp, synthetic construct
  misc_feature 1..2208: note = source = /note="Description of Artificial Sequence: Synthetic polynucleotide"
  source 1..2208: mol_type = other DNA
atggctgccgatggttatcttccagattggctcgaggacaaccttagtgaaggaattcgcgagtggtgggctttgaaacctggagcccctcaacccaaggcaaatcaacaacatcaagacaacgctcggggtcttgtgcttccgggttacaaataccttggacccggcaacggactcgacaagggggagccggtcaacgcagcagacgcggcggccctcgagcacgacaaggcctacgaccagcagctcaaggccggagacaacccgtacctcaagtacaaccacgccgacgccgagttccaggagcggctcaaagaagatacgtcttttgggggcaacctcgggcgagcagtcttccaggccaaaaagaggcttcttgaacctcttggtccggttgaggaagcggctaagacggctcctggaaagaagaggcctgtagagcagtctcctcaggaaccggactcctccgcgggtattggcaaatcgggtgcacagcccgctaaaaagagactcaatttcggtcagactggcgacacagagtcagtcccagaccctcaaccaatcggagaacctcccgcagccccctcaggtgtgggatctcttacaatggcttcaggtggtggcgcaccagtggcagacaataacgaaggtgccgatggagtgggtagttcctcgggaaattggcattgcgattcccaatggctgggggacagagtcatcaccaccagcacccgaacctgggccctgcccacctacaacaatcacctctacaagcaaatctccaacagcacatctggaggatcttcaaatgacaacgcctacttcggctacagcaccccctgggggtattttgacttcaacagattccactgccacttctcaccacgtgactggcggcgactcatcaacaacaactggggattccggcctaagcgactcaacttcaagctcttcaacattcaggtcaaagaggttacggacaacaatggagtcaagaccatcgccaataaccttaccagcacggtccaggtcttcacggactcagactatcagctcccgtacgtgctcgggtcggctcacgagggctgcctcccgccgttcccagcggacgttttcatgattcctcagtacgggtatctgacgcttaatgatggaagccaggccgtgggtcgttcgtccttttactgcctggaatatttcccgtcgcaaatgctaagaacgggtaacaacttccagttcagctacgagtttgagaacgtacctttccatagcagctacgctcacagccaaagcctggaccgactaatgaatccactcatcgaccaatacttgtactatctctcaaagactattaacggttctggacagaatcaacaaacgctaaaattcagtgtggccggacccagcaacatggctgtccagggaagaaactacatacctggacccagctaccgacaacaacgtgtctcaaccactgtgactcaaaacaacaacagcgaatttgcttggcctggagcttcttcttgggctctcaatggacgtaatagcttgatgaatcctggacctgctatggccagccacaaagaaggagaggaccgtttctttcctttgtctggatctttaatttttggcaaacaaggaactggaagagacaacgtggatgcggacaaagtcatgataaccaacgaagaagaaattaaaactactaacccggtagcaacggagtcctatggacaagtggccacaaaccaccagagtgcccaagcacaggcgcagaccggctgggttcaaaaccaaggaatacttccgggtatggtttggcaggacagagatgtgtacctgcaaggacccatttgggccaaaattcctcacacggacggcaactttcacccttctccgctgatgggagggtttggaatgaagcacccgcctcctcagatcctcatcaaaaacacacctgtacctgcggatcctccaacggccttcaacaaggacaagctgaactctttcatcacccagtattctactggccaagtcagcgtggagatcgagtgggagctgcagaaggaaaacagcaagcgctggaacccggagatccagtacacttccaactattacaagtctaataatgttgaatttgctgttaatactgaaggtgtatatagtgaaccccgccccattggcaccagatacctgactcgtaatctg

SEQ ID NO: 626 - DNA, 2208 bp, synthetic construct
  misc_feature 1..2208: note = source = /note="Description of Artificial Sequence: Synthetic polynucleotide"
  source 1..2208: mol_type = other DNA
atggctgccgatggttatcttccagattggctcgaggacaaccttagtgaaggaattcgcgagtggtgggctttgaaacctggagcccctcaacccaaggcaaatcaacaacatcaagacaacgctcgaggtcttgtgcttccgggttacaaataccttggacccggcaacggactcgacaagggggagccggtcaacgcagcagacgcggcggccctcgagcacgacaaggcctacgaccagcagctcaaggccggagacaacctgtacctcaagtacaaccacgccgacgccgagttccaggagcggctcaaagaagatacgtcttttgggggcaacctcgggcgagcagtcttccaggccaaaaagaggcttcttgaacctcttggtctggttgaggaagcggctaagacggctcctggaaagaagaggcctgtagagcagtctcctcaggaaccggactcctccgcgggtattggcaaatcgggtgcacagcccgctaaaaagagactcaatttcggtcagactggcgacacagagtcagtcccagaccctcaaccaatcggagaacctcccgcagccccctcaggtgtgggatctcttacaatggcttcaggtggtggcgcaccagtggcagacaataacgaaggtgccgatggagtgggtagttcctcgggaaattggcattgcgattcccaatggctgggggacagagtcatcaccaccagcacccgaacctgggccctgcccacctacaacaatcacctctacaagcaaatctccaacagcacatctggaggatcttcaaatgacaacgcctacttcggctacagcaccccctgggggtattttgacttcaacagattccactgccacttctcaccacgtgactggcagcgactcatcaacaacaactggggattccggcctaagcgactcaacttcaagctcttcaacattcaggtcaaagaggttacggacaacaatggagtcaagaccatcgccaataaccttaccagcacggtccaggtcttcacggactcagactatcagctcccgtacgtgctcgggtcggctcacgagggctgcctcccgccgttcccagcggacgttttcatgattcctcagtacgggtatctgacgcttaatgatggaagccaggccgtgggtcgttcgtccttttactgcctggaatatttcccgtcgcaaatgctaagaacgggtaacaacttccagttcagctacgagtttgagaacgtacctttccatagcagctacgctcacagccaaagcctggaccgactaatgaatccactcatcgaccaatacttgcactatctctcaaagactattaacggttctggacagaatcaacaaacgctaaaattcagtgtggccggacccagcaacatggctgtccagggaagaaactacatacctggacccagctaccgacaacaacgtgtctcaaccactgtgactcaaaacaacaacagcgaatttgcttggcctggagcttcttcttgggctctcaatggacgtaatagcttgatgaatcctggacctgctatggccagccacaaagaaggagaggaccgtttctttcctttgtctggatctttaatttttggcaaacaaggaactggaagagacaacgtggatgcggacaaagtcatgataaccaacgaagaagaaattaaaactactaacccggtagcaacggagtcctatggacaagtggccacaaaccaccagagtgcccaagcacaggcgcagaccggctgggttcaaaaccaaggaatacttccgggtatggtttggcaggacagagatgtgtacctgcaaggacccatttgggccaaaattcctcacacggacggcaactttcacccttctccgctgatgggagggtttggaatgaagcacccgcctcctcagatcctcatcaaaaacacacctgtacctgcggatcctccaacggccttcaacaaggacaagctgaactctttcatcacccagtattctactggccaagtcagcgtggagatcgagtgggagctgcagaaggaaaacagcaagcgctggaacccggagatccagtacacttccaactattacaagtctaataatgttgaatttgctgttaatactgaaggtgtatatagtgaaccccgccccattggcaccagatacctgactcgtaatctg

SEQ ID NO: 627 - DNA, 2208 bp, synthetic construct
  misc_feature 1..2208: note = source = /note="Description of Artificial Sequence: Synthetic polynucleotide"
  source 1..2208: mol_type = other DNA
atggctgccgatggttatcttccagattggctcgaggacaaccttagtgaaggaattcgcgagtggtgggctttgaaacctggagcccctcaacccaaggcaaatcaacaacatcaagacaacgctcgaggtcttgtgcttccgggttacaaataccttggacccggcaacggactcgacaagggggagccggtcaacgcagcagacgcggcggccctcgagcacgacaaggcctacgaccagcagctcaaggccggagacaacccgtacctcaagtacaaccacgccgacgccgagttccaggagcggctcaaagaagatacgtcttttgggggcaacctcgggcgagcagtcttccaggccaaaaagaggcttcttgaacctcttggtctggttgaggaagcggctaagacggctcctggaaagaagaggcctgtagagcagtctcctcaagaaccggactcctccgcgggtattggcaaatcgggtgcacagcccgctaaaaagagactcaatttcggtcagactggcgacacagagtcagtcccagaccctcaaccaatcggagaacctcccgcagccccctcaggtgtgggatctcttacaatggcttcaggtggtggcgcaccagtggcagacaataacgaaggtgccgatggagtgggtagttcctcgggaaattggcattgcgattcccaatggctgggggacagagtcatcaccaccagcacccgaacctgggccctgcccacctacaacaatcacctctacaagcaaatctccaacagcacatctggaggatcttcaaatgacaacgcctacttcggctacagcaccccctgggggtattttgacttcaacagattccactgccacttctcaccacgtgactggcagcgactcatcaacaacaactggggattccggcctaagcgactcaacttcaagctcttcaacattcaggtcaaagaggttacggacaacaatggagtcaagaccatcgccaataaccttaccagcacggtccaggtcttcacggactcagactatcagctcccgtacgtgctcgggtcggctcacgagggctgcctcccgccgttcccagcggacgttttcatgattcctcagtacgggtatctgacgcttaatgatggaagccaggccgtgggtcgttcgtccttttactgcctggaatatttcccgtcgcaaatgctaagaacgggtaacaacttccagttcagctacgagtttgagaacgtacctttccatagcagctacgctcacagccaaagcctggaccgactaatgaatccactcatcgaccaatacttgcactatctctcaaagactattaacggttctggacagaatcaacaaacgctaaaattcagtgtggccggacccagcaacatggctgtccagggaagaaactacatacctggacccagctaccgacaacaacgtgtctcaaccactgtgactcaaaacaacaacagcgaatttgcttggcctggagcttcttcttgggctctcaatggacgtaatagcttgatgaatcctggacctgctatggccagccacaaagaaggagaggaccgtttctttcctttgtctggatctttaatttttggcaaacaaggaactggaagagacaacgtggatgcggacaaagtcatgataaccaacgaagaagaaattaaaactactaacccggtagcaacggagtcctatggacaagtggccacaaaccaccagagtgcccaagcacaggcgcagaccggctgggttcaaaaccaaggaatacttccgggtatggtttggcaggacagagatgtgtacctgcaaggacccatttgggccaaaattcctcacacggacggcaactttcacccttctccgctgatgggagggtttggaatgaagcacccgcctcctcagatcctcatcaaaaacacacctgtacctgcggatcctccaacggccttcaacaaggacaagctgaactctttcatcacccagtattctactggccaagtcagcgtggagatcgagtgggagctgcagaaggaaaacagcaagcgctggaacccggagatccagtacacttccaactattacaagtctaataatgttgaatttgctgttaatactgaaggtgtatatagtgaaccccgccccattggcaccagatacctgactcgtaatctg

SEQ ID NO: 628 - DNA, 2208 bp, synthetic construct
  misc_difference 1325: note = modified_base - a, c, t, or g
  misc_feature 1..2208: note = source = /note="Description of Artificial Sequence: Synthetic polynucleotide"
  source 1..2208: mol_type = other DNA
atggctgccgatggttatcttccagattggctcgaggacaaccttagtgaaggaattcgcgagtggtgggctttgaaacctggagcccctcaacccaaggcaaatcaacaacatcaagacaacgctcgaggtcttgtgcttccgggttacaaataccttggacccggcaacggactcgacaagggggagccggtcaacgcagcagacgcggcggccctcgagcacgacaaggcctacgaccagcagctcaaggccggagacaacccgtacctcaagtacaaccacgccgacgccgagttccaggagcggctcaaagaagatacgtcttttgggggcaacctcgggcgagcagtcttccaggccaaaaagaggcttcttgaacctcttggtctggttgaggaagcggctaagacggctcctggaaagaagaggcctgtagagcagtctcctcaggaaccggactcctccgcgggtattggcaaatcgggtgcacagcccgctaaaaagagactcaatttcggtcagactggcgacacagagtcagtcccagaccctcaaccaatcggagaacctcccgcagccccctcaggtgtgggatctcttacaatggcttcaggtggtggcgcaccagtggcagacaataacgaaggtgccgatggagtgggtagttcctcgggaaattggcattgcgattcccaatggctgggggacagagtcatcaccaccagcacccgaacctgggccctgcccacctacaacaatcacctctacaagcaaatctccaccagcacatctggaggatcttcaaatgacaacgcctacttcggctacagcaccccctgggggtattttgacttcaacagattccactgccacttctcaccacgtgactggcagcgactcatcaacaacaactggggattccggcctaagcgactcaacttcaagctcttcaacattcaggtcaaagaggttacggacaacaatggagtcaagaccatcgccaataaccttaccagcacggtccaggtcttcacggactcagactatcagctcccgtacgtgctcgggtcggctcacgagggctgcctcccgccgttcccagcggacgttttcatgattcctcagtacgggtatctgacgcttaatgatggaagccaggccgtgggtcgttcgtccttttactgcctggaatatttcccgtcgcaaatgctaagaacgggtaacaacttccagttcagctacgagtttgagaacgtacctttccatagcagctacgctcacagccaaagcctggaccgactaatgaatccactcatcgaccnatacttgcactatctctcaaagactattaacggttctggacagaatcaacaaacgctaaaattcagtgtggccggacccagcaacatggctgtccagggaagaaactacatacctggacccagctaccgacaacaacgtgtctcaaccactgtgactcaaaacaacaacagcgaatttgcttggcctggagcttcttcttgggctctcaatggacgtaatagcttgatgaatcctggacctgctatggccagccacaaagaaggagaggaccgtttctttcctttgtctggatctttaatttttggcaaacaaggaactggaagagacaacgtggatgcggacaaagtcatgataaccaacgaagaagaaattaaaactactaacccggtagcaacggagtcctatggacaagtggccacaaaccaccagagtgcccaagcacaggcgcagaccggctgggttcaaaaccaaggaatacttccggatatggtttggcaggacagagatgtgtacctgcaaggacccatttgggccaaaattcctcacacggacggcaactttcacccttctccgctgatgggagggtttggaatgaagcacccgcctcctcagatcctcatcaaaaacacacctgtacctgcggatcctccaacggccttcaacaaggacaagctgaactctttcatcacccagtattctactggccaagtcagcgtggagatcgagtgggagctgcagaaggaaaacagcaagcgctggaacccggagatccagtacacttccaactattacaagtctaataatgttgaatttgctgttaatactgaaggtgtatatagtgaaccccgccccattggcaccagatacctgactcgtaatctg

SEQ ID NO: 629 - DNA, 2208 bp, synthetic construct
  misc_feature 1..2208: note = source = /note="Description of Artificial Sequence: Synthetic polynucleotide"
  source 1..2208: mol_type = other DNA
atggctgccgatggttatcttccagattggctcgaggacaaccttagtgaaggaattcgcgagtggtgggctttgaaacctggagcccctcaacccaaggcaaatcaacaacatcaagacaacgctcgaggtcttgtgcttccgggttacaaataccttggacccggcaacggactcgacaagggggagccggtcaacgcagcagacgcggcggccctcgagcacgacaaggcctacgaccagcagctcaaggccggagacaacccgtacctcaagtacaaccacgccgacgccgagttccaggagcggctcaaagaagatacgtcttttgggggcaacctcgggcgagcagtcttccaggccaaaaagaggcttcttgaacctcttggtctggttgaggaagcggctaagacggctcctggaaagaagaggcctgtagagcagtctcctcaggaaccggactcctccgcgggtattggcaaatcgggtgcacagcccgctaaaaagagactcaatttcggtcagactggcgacacagagtcagtcccagaccctcaaccaatcggagaacctcccgcagccccctcaggtgtgggatctcttacaatggcttcaggtggtggcgcaccagtggcagacaataacgaaggtgccgatggagtgggtagttcctcgggaaattggcattgcgattcccaatggctgggggacagagtcatcaccaccagcacccgaacctgggccctgcccacctacaacaatcacctctacaagcaaatctccaacagcacatctggaggatcttcaaatgacaacgcctacttcggctacagcaccccctgggggtattttgacttcaacagattccactgccacttctcaccacgtgactggcagcgactcatcaacaacaactggggattccggcctaagcgactcaacttcaagctcttcaacattcaggtcaaagaggttacggacaacaatggagtcaagaccatcgccaataaccttaccagcacggtccaggtcttcacggactcagactatcagctcccgtacgtgctcgggtcggctcacgagggctgcctcccgccgttcccagcggacgttttcatgattcctcagtacgggtatctgacgcttaatgatggaagccaggccgtgggtcgttcgtccttttactgcctggaatatttcccgtcgcaaatgctaagaacgggtaacaacttccagttcagctacgagtttgagaacgtacctttccatagcagctacgctcacagccaaagcctggaccgactaatgaatccactcatcgaccaatacttgcactatctctcaaagactattaacggttctggacagaatcaacaaacgctaaaattcagtgtggccggacccagcaacatggctgtccagggaagaaactacatacctggacccagctaccgacaacaacgtgtctcaaccactgtgactcaaaacaacaacagcgaatttgcttggcctggagcttcttcttgggctctcaatggacgtaatagcttgatgaatcctggacctgctatggccagctacaaagaaggagaggacagtttctttcctttgtctggatctttaatttttggcaaacaaggaactggaagagacaacgtggatgcggacaaagtcatgataaccaacgaagaagaaattaaaactactaacccggtagcaacggagtcctatggacaagtggccacaaaccaccagagtgcccaagcacaggcgcagaccggctgggttcaaaaccaaggaatacttccgggtatggtttggcaggacagagatgtgtacctgcaaggacccatttgggccaaaattcctcacacggacggcaactttcacccttctccgctgatgggagggtttggaatgaagcacccgcctcctcagaccctcatcaaaaacacacctgtacctgcggatcctccaacggccttcaacaaggacaagctgaactctttcatcacccagtattctactggccaagtcagcgtggagatcgagtgggagctgcagaaggaaaacagcaagcgctggaacccggagatccagtacacttccaactattacaagtctaataatgttgaatttgctgttaatactgaaggtgtatatagtgaaccccgccccattggcaccagatacctgactcgtaatctg

SEQ ID NO: 630 - DNA, 2208 bp, synthetic construct; identical to SEQ ID NO: 613
  misc_feature 1..2208: note = source = /note="Description of Artificial Sequence: Synthetic polynucleotide"
  source 1..2208: mol_type = other DNA

SEQ ID NO: 631 - DNA, 2208 bp, synthetic construct
  misc_feature 1..2208: note = source = /note="Description of Artificial Sequence: Synthetic polynucleotide"
  source 1..2208: mol_type = other DNA
atggctgccgatggttatcttccagattggctcgaggacaaccttagtgaaggaattcgcgagtggtgggctttgaaacctggagcccctcaacccagggcaaatcaacaacatcaagacaacgctcgaggtcttgtgcttccgggttacaaataccttggacccggcaacggactcgacaagggggagccggtcaacgcagccgacgcggcggccctcgagcacgacaaggcctacgaccagcagctcaaggccggagacaacccgtacctcaagtacaaccacgccgacgccgagttccaggagcggctcaaagaagatacgtcttttgggggcaacctcgggcgagcagtcttccaggccaaaaagaggcttcttgaacctcttggtctggttgaggaagcggctaagacggctcctggaaagaagaggcctgtagagcagtctcctcaggaaccggactcctccgcgggtattggcaaatcgggtgcacagcccgctaaaaagagactcaatttcggtcagactggcgacacagagtcagtcccagaccctcaaccaatcggagaacctcccgcagccccctcaggtgtgggatctcttacaatggcttcaggtggtggcgcaccagtggcagacaataacgaaggtgccgatggagtgggtagttcctcgggaaattggcattgcgattcccaatggctgggggacagagtcatcaccaccagcacccgaacctgggccctgcccacctacaacaatcacctctacaagcaaatctccaacagcacatctggaggatcttcaaatgacaacgcctacttcggctacagcaccccctgggggtattttgacttcaacagattccactgccacttctcaccacgtgactggcagcgactcatcaacaacaactggggattccggcctaagcgactcaacttcaagctcttcaacattcaggtcaaagaggttacggacaacaatggagtcaagaccatcgccaataaccttaccagcacggtccaggtcttcacggactcagactgtcagctcccgtacgtgctcgggtcggctcacgagggctgcctcccgccgttcccagcggacgttttcatgattcctcagtacgggtatctgacgcttaatgatggaagccaggccgtgggtcgttcgtccttttactgcctggaatatttcccgtcgcaaatgctaagaacgggtaacaacttccagttcagctacgagtttgagaacgtacctttccatagcagctacgctcacagccaaagcctggaccgactaacgaatccactcatcgaccaatacttgtactatctctcaaagactattaacggttctggacagaatcaacaaacgctaaaattcagtgtggccggacccagcaacatggctgtccagggaagaaactacatacctggacccagctaccgacaacaacgtgtctcaaccactgtgactcaaaacaacaacagcgaatttgcttggcctggagcttcttcttgggctctcaatggacgtaatagcttgatgaatcctggacctgctatggccagccacaaagaaggagaggaccgtttctttcctttgtctggatctttaatttttggcaaacaaggaactggaagagacaacgtggatgcggacaaagtcatgataaccaacgaagaagaaattaaaactactaacccggtagcaacggagtcccatggacaagtggccacaaaccaccagagtgcccaagcacaggcgcagaccggctgggttcaaaaccaaggaatacttccgggtatggtttggcaggacagagatgtgtacctgcaaggacccatttgggccaaaattcctcacacggacggcaactttcacccttctccgctgatgggagggtttggaatgaagcacccgcctcctcagatcctcatcaaaaacacacctgtacctgcggatcctccaacggccttcaacaaggacaagctgaactctttcatcacccagtattctactggccaagtcagcgtggagatcgagtgggagctgcagaaggaaaacagcaagcgctggaacccggagatccagtacacttccaactattacaagtctaataatgttgaatttgctgttaatactgaaggtgtatatagtgaaccccgccccattggcaccagatacctgactcgtaatctg

SEQ ID NO: 632 - DNA, 2208 bp, synthetic construct
  misc_feature 1..2208: note = source = /note="Description of Artificial Sequence: Synthetic polynucleotide"
  source 1..2208: mol_type = other DNA
atggctgccgatggttatcttccagattggctcgaggacaaccttagtgaaggaattcgcgagtggtgggctttgaaacctggagcccctcaacccaaggcaaatcaacaacatcaagacaacgctcgaggtcttgtgcttccgggttacaaataccttggacccggcaacggactcgacaagggggagccggtcaacgcagcagacgcggcggccctcgagcacgacaaggcctacgaccagcagctcaaggccggagacaacccgtacctcaagtacaaccacgccgacgccgagttccaggagcggctcaaagaagatacgtcttttgggggcaacctcgggcgagcagtcttccaggccaaaaagaggcttcttgaacctcttggtctggttgaggaagcggctaagacggctcctggaaagaagaggcctgtagagcagtctcctcaggaaccggactcctccgcgggtattggcaaatcgggtgcacagcccgctaagaagagactcaatttcggtcagactggcgacacagagtcagtcccagaccctcaaccaatcggagaacctcccgcagccccctcaggtgtgggatctcttacaatggcttcaggtggtggcgcaccagtggcagacaataacgaaggtgccgatggagtgggtagttcctcgggaaattggcattgcgattcccaatggctgggggacagagtcatcaccaccagcacccgaacctgggccctgcccacctacaacaatcacctctacaagcaaatctccaacagcacatctggaggatcttcaaatgacaacgcctacttcggctacagcaccccctgggggtattttgacttcaacagattccactgccacttctcaccacgtgactggcagcgactcatcaacaacaactggggattccggcctaagcgactcaacttcaagctcttcaacattcaggtcaaagaggttacggacaacaatggagtcaagaccatcgccaataaccttaccagcacggtccaggtcttcacggactcagactatcagctcccgtacgtgctcgggtcggctcacgagggctgcctcccgccgttcccagcggacgttttcatgattcctcagtacgggtatctgacgcttaatgatggaagccaggccgtgggtcgttcgtccttttactgcctggaatatttcccgtcgcaaatgctaagaacgggtaacaacttccagttcagctacgagtttgagaacgtacctttccatagcagctacgctcacagccaaagcctggaccgactaatgaatccacccatcgaccaatacttgtactatctctcaaagactattaacggttctggacagaatcaacaaacgctaaaattcagtgtggccggacccagcaacatggctgtccagggaagaaactacatacctggacccagctaccgacaacaacgtgtctcaaccactgtgactcaaaacaacaacagcgaatttgcttggcctggagcttcttcttgggctctcaatggacgtaatagcttgatgaatcctggacctgctatggccagccacaaagaaggagaggaccgtttctttcctttgtctggatctttaatttttggcaaacaaggaactggaagagacaacgtggatgcggacaaagtcatgataaccaacgaagaagaaattaaaactactaacccggtagcaacggagtcctatggacaagtggccacaaaccaccagagtgcccaagcacaggcgcagaccggctgggttcaaaaccaaggaatacttccgggtatggtttggcaggacagagatgtgtacctgcaaggacccatttgggccaaaattcctcacacggacggcaactttcacccttctccgctgatgggagggtttggaatgaagcacccgcctcctcagatcctcatcaaaaacacacctgtacctgcggatcctccaacggccttcaacaaggacaagctgaactctttcatcacccagtattctactggccaagtcagcgtggagatcgagtgggagctgcagaaggaaaacagcaagcgctggaacccggagatccagtacacttccaactattacaagtctaataatgttgaatttgctgttaatactgaaggtgtatatggtgaaccccgccccattggcaccagatacctgactcgtaatctg

SEQ ID NO: 633 - DNA, 2208 bp, synthetic construct
  misc_feature 1..2208: note = source = /note="Description of Artificial Sequence: Synthetic polynucleotide"
  source 1..2208: mol_type = other DNA
atggctgccgatggttatcttccagattggctcgaggacaaccttagtgaaggaattcgcgagtggtgggctttgaaacctggagcccctcaacccaaggcaaatcaacaacatcaagacaacgctcgaggtcttgtgcttccgggttacaaataccttggacccggcaacggactcgacaagggggagccggtcaacgcagcagacgcggcggccctcgagcacgacaaggcctacgaccagcagctcaaggccggagacaacccgtacctcaagtacaaccacgccgacgccgagttccaggagcggctcaaagaagatacgtcttttgggggcaacctcgggcgagcagtcttccaggccaaaaagaggcttcttgaacctcttggtctggttgaggaagcggctaagacggctcctggaaagaagaggcctgtagagcagtctcctcaggaaccggactcctccgcgggtattggcaaatcgggtgcacagcccgctaaaaagagactcaatttcggtcagactggcgacacagagtcagtcccagaccctcaaccaatcggagaacctcccgcagccccctcaggtgtgggatctcttacaatggcttcaggtggtggcgcaccagtggcagacaataacgaaggtgccgatggagtgggtagttcctcgggaaattggcattgcgattcccaatggctgggggacagagtcatcaccaccagcacccgaacctgggccctgcccacctacaacaatcacctctacaagcaaatctccaacagcacatctggaggatcttcaaatgacaacgcctacttcggctacagcaccccctgggggtattttgacttcaacagattccactgccacttctcaccacgtgaccggcagcgactcatcaacaacaactggggattccggcctaagcgactcaacttcaagctcttcaacattcaggtcaaagaggttacggacaacaatggagtcaagaccatcgccaataaccttaccagcacggtccaggtcttcacggactcagactatcagctcccgtacgtgctcgggtcggctcacgagggctgcctcccgccgttcccagcggacgttttcatgattcctcagtacgggtatctgacgcttaatgatggaagccaggccgtgggtcgttcgtccttttactgcctggaatatttcccgtcgcaaatgctaagaacgggtaacaacttccagttcagctacgagtttgagaacgtacctttccatagcagctacgctcacagccaaagcctggaccgactaatgaatccactcatcgaccaatacttgtactatctctcaaagactattaacggttctggacagaatcaacaaacgctaaaattcagtgtggccggacccagcaacatggctgtccagggaagaaactacatacctggacccagctaccgacaacaacgtgtctcaaccactgtgactcaaaacaacaacagcgaatttgcttggcctggagcttcttcttgggctctcaatggacgtaatagcttgatgaatcctggacctgctatggccagccacaaagaaggagaggaccgtttctttcctttgtctggatctttaatttttggcaaacaaggaactggaagagacaacgtggatgcggacaaagtcatgataaccaacgaagaagaaattaaaactactaacccggtagcaacggagtcctatggacaagtggccacaaaccaccagagtgcccaagcacaggcgcagaccggctgggttcaaaaccaaggaatacttccgggtatggtttggcaggacagagatgtgtacctgcaaggacccatttgggccaaaattcctcacacggacggcaactttcacccttctccgctgatgggagggtttggaatgaagcacccgcctcctcagatcctcatcaaaaacacacctgtacctgcggatcctccaacggccttcaacaaggacaagctgaactctttcatcacccagtattctactggccaagtcagcgtggagatcgagtgggagctgcagaaggaaaacagcaagcgctggaacccggagatccagtacacttccaactattacaagtctaataatgttgaatttgctgttaatactgaaggtgtatatagtgaaccccgccccattggcaccagatacctgactcgtaatctg

SEQ ID NO: 634 - DNA, 2208 bp, synthetic construct
  misc_feature 1..2208: note = source = /note="Description of Artificial Sequence: Synthetic polynucleotide"
  source 1..2208: mol_type = other DNA
atggctgccgatggttatcttccagattggctcgaggacaaccttagtgaaggaattcgcgagtggtgggctttgaaacctggagcccctcaacccaaggcaaatcaacaacatcaagacaacgctcgaggtcttgtgcttccgggttacaaataccttggacccggcaacggactcgacaagggggagccggtcaacgcagcagacgcggcagccctcgagcacgacaaggcctacgaccagcagctcaaggccggagacaacccgtacctcaagtacaaccacgccgacgccgagttccaggagcggctcaaagaagatacgtcttttgggggcaacctcgggcgagcagtcttccaggccaaaaagaggcttcttgaacctcttggtctggttgaggaagcggctaagacggctcctggaaagaagaggcctgtagagcagtctcctcaggaaccggactcctccgcgggtattggcaaatcgggtgcacagcccgctaaaaagagactcaatttcggtcagactggcgacacagagtcagtcccagaccctcaaccaatcggagaacctcccgcagccccctcaggtgtgggatctcttacaatggcttcaggtggtggcgcaccagtggcagacaataacgaaggtgccgatggagtgggtagttcctcgggaaattggcattgcaattcccaatggctgggggacagagtcatcaccaccagcacccgaacctgggccctgcccacctacaacaatcacctctacaagcaaatctccaacagcacatctggaggatcttcaaatgacaacgcctacttcggctacagcaccccctgggggtattttgacttcaacagattccactgccacttctcaccacgtgactggcagcgactcatcaacaacaactggggattccggcctaagcgactcaacttcaagctcttcaacattcaggtcaaagaggttacggacaacaatggagtcaagaccatcgccaataaccttaccagcacggtccaggtcttcacggactcagactatcagctcccgtacgtgctcgggtcggctcacgagggctgcctcccgccgttcccagcggacgttttcatgattcctcagtacgggtatctgacgcttaatgatggaagccaggccgtgggtcgttcgtccttttactgcctggaatatttcccgtcgcaaatgctaagaacgggtaacaacttccagttcagctacgagtttgagaacgtacctttccatagcagctacgctcacagccaaagcctggaccgactaatgaatccactcatcgaccaatacttgtactatctctcaaagactattaacggttctggacagaatcaacaaacgctaaaattcagtgtggccggacccggcaacatggctgtccagggaagaaactacatacctggacccagctaccgacaacaacgtgtctcaaccactgtgactcaaaacaacaacagcgaatttgcttggcctggagcttcttcttgggctctcaatggacgtaatagcttgatgaatcctggacctgctatggccagccacaaagaaggagaggaccgtttctttcctttgtctggatctttaatttttggcaaacaaggaactggaagagacaacgtggatgcggacaaagtcatgataaccaacgaagaagaaattaaaactactaacccggtagcaacggagtcctatggacaagtggccacaaaccaccagagtgcccaagcacaggcgcagaccggctgggttcaaaaccaaggaatacttccgggtatggtttggcaggacagagatgtgtacctgcaaggacccatttgggccaaaattcctcacacggacggcaactttcacccttctccgctgatgggagggtttggaatgaagcacccgcctcctcagatcctcatcaagaacacacctgtacctgcggatcctccaacggccttcaacaaggacaagctgaactctttcatcacccagtattctactggccaagtcagcgtggagatcgagtgggagctgcagaaggaaaacagcaagcgctggaacccggagatccagtacacttccaactattacaagtctaataatgttgaatttgctgttaatactgaaggtgtatatagtgaaccccgccccattggcaccagatacctgactcgtaatctg

SEQ ID NO: 635 - DNA, 2208 bp, synthetic construct
  misc_feature 1..2208: note = source = /note="Description of Artificial Sequence: Synthetic polynucleotide"
  source 1..2208: mol_type = other DNA
atggctgccgatggttatcttccagattggctcgaggacaaccttagtgaaggaattcgcgagtggtgggctttgaaacctggagcccctcaacccaaggcaaatcaacaacatcaagacaacgctcgaggtcttgtgcttccgggttacagataccttggacccggcaacggactcgacaagggggagccggtcaacgcagcagacgcggcggccctcgagcacgacaaggcctacgaccagcagctcaaggccggagacaacccgtacctcaagtacaaccacgccgacgccgagttccaggagcggctcaaagaagatacgtcttttgggggtaacctcgggcgagcagtcttccaggccaaaaagaggcttcttgaacctcttggtctggttgaggaagcggctaagacggctcctggaaagaagaggcctgtagagcagtctcctcaggaaccggactcctccgcgggtatcggcaaatcgggtgcacagcccgctaaaaagagactcaatttcggtcagactggcgacacagagtcagtcccagaccctcaaccaatcggagaacctcccgcagccccctcaggtgtgggatctcttacaatggcttcaggtggtggcgcaccagtggcagacaataacgaaggtgccgatggagtgggtagttcctcgggaaattggcattgcgattcccaatggctgggggacagagtcatcaccaccagcacccgaacctgggccctgcccacctacaacaatcacctctacaagcaaatctccaacagcacatctggaggatcttcaaatgacaacgcctacttcggctacagcaccccctgggggtattttgacttcaacagattccactgccacttctcaccacgtgactggcagcgactcatcaacaacaactggggattccggcctaagcgactcaacttcaagctcttcaacattcaggtcaaagaggttacggacaacaatggagtcaagaccgtcgccaataaccttaccagcacggtccaggtcttcacggactcagactatcagctcccgtacgtgctcgggtcggctcacgagggctgcctcccgccgttcccagcggacgttttcatgattcctcagtacgggtatctgacgcttaatgatggaagccaggccgtgggtcgttcgtccttttactgcctggaatatttcccgtcgcaaatgctaagaacgggtaacaacttccagttcagctacgagtttgagaacgtacctttccatagcagctacgctcacagccaaagcctggaccgactaatgaatccactcatcgaccaatacttgtactatctctcaaagactattaacggttctggacagaatcaacaaacgctaaaattcagtgtggccggacccagcaacatggctgtccagggaagaaactacatacctggacccagctaccgacaacaacgtgtctcaaccactgtgactcaaaacaacaacagcgaatttgcttggcctggagcttcttcttgggctctcaatggacgtaatagcttgatgaatcctggacctgctatggccagccacaaagaaggagaggaccgtttctttcctttgtctggatctttaatttttggcaaacaaggaactggaagagacaacgtggatgcggacaaagtcatgataaccaacgaagaagaaattaaaactactaacccggtagcaacggagtcctatggacaagtggccacaaaccaccagagtgcccaagcacaggcgcagaccggctgggttcaaaaccaaggaatacttccgggtatggtttggcaggacagagatgtgtacctgcaaggacccatttgggccaaaattcctcacacggacggcaactttcacccttctccgctgatgggagggtttggaatgaagcacccgcctcctcagatcctcatcaaaaacacacctgtacctgcggatcctccaacggccttcaacaaggacaagctgaactctttcatcacccagtattctactggccaagtcagcgtggagatcgagtgggagctgcagaaggaaaacagcaagcgctggaacccggagatccagtacacttccaactattacaagtctaataatgttgaatttgctgttaatactgaaggtgtatatagtggaccccgccccattggcaccagatacctgactcgtaatctg

SEQ ID NO: 636 - DNA, 2208 bp, synthetic construct
  misc_feature 1..2208: note = source = /note="Description of Artificial Sequence: Synthetic polynucleotide"
  source 1..2208: mol_type = other DNA
atggctgccgatggttatcttccagattggctcgaggacaaccttagtgaaggaattcgcgagtggtgggctttgaaacctggagcccctcaacccaaggcaaatcaacaacatcaagacaacgctcgaggtcttgtgcttccgggttacaaataccttggacccggcaacggactcgacaagggggagccggtcaacgcagcagacgcggcggccctcgagcacgacaaggcctacgaccagcagctcaaggccggagacaacccgtacctcaagtacaaccacgccgacgccgagttccaggagcggctcaaagaagatacgtcttttgggggcaacctcgggcgagcagtcttccaggccaaaaagaggcttcttgaacctcttggtctggttgaggaagcggctaagacggctcctggaaagaagaggcctgtagagcagtctcctcaggaaccggactcctccgcgggtattggcaaatcgggtgcacagcccgctaaaaagagactcaatttcggtcagactggcgacacagagtcagtcccagaccctcaaccaatcggagaacctcccgcagccccctcaggtgtgggatctcttacaatggcttcaggtggtggcgcaccagtggcagacaataacgaaggtgccgatggagtgggtagttcctcgggaaattggcattgcgattcccaatggctgggggacagagtcatcaccaccagcacccgaacctgggccctgcccacctacaacaatcacctctacaagcaaatctccaacagcacatctggaggatcttcaaatgacaacgcctacttcggctacagcaccccctgggggtattttgacttcaacagattccactgccacttctcaccacgtgactggcagcgactcatcaacaacaactggggattccggcctaagcgactcaacttcaagctcttcaacattcaggtcaaagaggttacggacaacaatggagtcaagaccatcgccaataaccttaccagcacggtccaggtcttcacggactcagactatcagctcccgtacgtgctcgggtcggctcacgagggctgcctcccgccgttcccagcggacgttttcatgattcctcagtacgggtatctgacgcttaatgatggaagccaggccgtgggtcgttcgtccttttactgcctggaatatttcccgtcgcaaatgctaagaacgggtaacaacttccagttcagctacgagtttgagaacgtacctttccatagcagctacgctcacagccaaagcctggaccgactaatgaatccactcatcgaccaatacttgtactatctctcaaagactattaacggttctggacagaatcaacaaacgctaaaattcagtgtggccggacccagcaacatggctgtccagggaagaaactacatacctggacccagctaccgacaacaacgtgtctcaaccactgtgactcaaaacaacaacagcgaatttgcttggcctggagcttcttcttgggctctcaatggacgtaatagcttgatgaatcctggacctgctatggccagccacaaagaaggagaggaccgtttctttcctttgtctggatctttaatttttggcaaacaaggaactggaagagacaacgtggatgcggacaaagtcatgataaccaacgaagaagaaattaaaactactaacccggtagcaacggagtcctatggacaagtggccacaaaccaccagagtgcccaagcacaggcgcagaccggctgggttcaaaaccaaggaatacttccgggtatggtttggcaggacagagatgtgtacctgcaaggacccatttgggccaaaattcctcacacggacggcaactttcacccttctccgctgatgggagggtttggaatgaagcacccgcctcctcagatcctcatcaaaaacacacctgtacctgcggatcctccaacggccttcaacaaggacaagctgaactctttcatcacccagtattctactggccaagtcagcgtggagatcgagtgggagctgcagaaggaaaacagcaagcgctggaacccggagatccagtacacttccaactattacaagtctaataatgttgaatttgctgttaatactgaaggtgtatatagtgaaccccgccccattggcaccagatacctgactcgtaatctg

SEQ ID NO: 637 - DNA, 2208 bp, synthetic construct
  misc_feature 1..2208: note = source = /note="Description of Artificial Sequence: Synthetic polynucleotide"
  source 1..2208: mol_type = other DNA
atggctgccgatggttatcttccagattggctcgaggacaaccttagtgaaggaattcgcgagtggtgggctttgaaacctggagcccctcaacccaaggcaaatcaacaacgtcaagacaacgctcgaggtcttgtgcttccgggttacaaataccttggacccggcaacggactcgacaagggggagccggtcaacgcagcagacgcggcggccctcgagcacgacaaggcctacgaccagcagctcaaggccggaggcaacccgtgcctcaagtacaaccacgccgacgccgagttccaggagcggctcaaagaagatacgtcttttgggggcaacctcgggcgagcagtcttccaggccaaaaagaggcttcttgaacctcttggtctggttgaggaagcggctaagacggctcctggaaagaagaggcctgtagagcagtctcctcaggaaccggactcctccgcgggtattggcagatcgggtgcacagcccgctaaaaagagactcaatttcggtcagactggcgacacagagtcagtcccagaccctcaaccaatcggagaacctcccgcagccccctcaggtgtgggatctcttacaatggcttcaggtggtggcgcaccagtggcagacaataacgaaggtgccgatggagtgggtagttcctcgggaaattggcattgcgattcccaatggctgggggacagagtcatcaccaccagcacccgaacctgggccctgcccacctacaacaatcacctctacaagcaaatctccaacagcacatctggaggatcttcaaatgacaacgcctacttcggctacagcaccccctgggggtattttgacttcaacagattccactgccacttctcaccacgtgactggcagcgactcatcaacaacaactggggattccggcctaagcgactcaacttcaagctcttcaacattcaggtcaaagaggttacggacaacaatggagtcaaggccatcgccaataaccttaccagcacggtccaggtcttcacggactcagactatcagctcccgtacgtgctcgggtcggctcacgagggctgcctcccgccgttcccagcggacgttttcatgattcctcagtacgggtatctgacgcttaatgatggaagccaggccgtgggtcgttcgtccttttactgcctggaatatttcccgtcgcaaatgctaagaacgggtaacaacttccagttcagctacgagtttgagaacgtacctttccatagcagctacgctcacagccaaagcctggaccgactaatgaatccactcatcgaccaatacttgtactatctctcaaagactattgacggttctggacagaatcaacaaacgctaaaattcagtgtggccggacccagcaacatggctgtccagggaagaaactacatacctggacccagctaccgacaacaacgtgtctcaaccactgtgactcaaaacaacaacagcgaatttgcttggcctggagcttcttcttgggctctcaatggacgtaatagcttgatggatcctggacctgctatggccagccacaaagaaggagaggaccgtttctttcctttgtctggatctttaatttttggcaaacaaggaactggaagagacaacgtggatgcggacaaagtcatgataaccaacgaagaagaaattaaaactactaacccggtagcaacggagtcctatggacaagtggccacaaaccaccagagtgcccaagcacaggcgcagaccggctgggttcaaaaccaaggaatacttccgggtatggtttggcaggacagagatgtgtacctgcaaggacccatttgggccaaaattcctcacacgggcggcaactttcacccttctccgctgatgggagggtttggaatgaagcacccgcctcctcagatcctcatcaaaaacacacctgtacctgcggatcctccaacggccttcaacaaggacaagctgaactctttcatcacccagtattctactggccaagtcagcgtggagatcgagtgggagctgcagaaggaaaacagcaagcgctggaacccggagatccagtacacttccaactattacaagtctaataatgttgaatttgctgttaatactgaaggtgtatatagtgaaccccgccccattggcaccagatacctgactcgtaatctg

SEQ ID NO: 638 - DNA, 2208 bp, synthetic construct
  misc_feature 1..2208: note = source = /note="Description of Artificial Sequence: Synthetic polynucleotide"
  source 1..2208: mol_type = other DNA
atggctgccgatggttatcttccagattggctcgaggacaaccttagtgaaggaattcgcgagtggtgggctttgaaacctggagcccctcaacccaaggcaaatcaacaacatcaagacaacgctcgaggtcttgtgcttccgggttacaaataccttggacccggcaacggactcgacaagggggagccggtcaacgcagcagacgcggcggccctcgagcacgacaaggcctacgaccagcagctcaaggccggagacaacccgtacctcaagtacaaccacgccgacgccgagttccaggagcggctcaaagaagatacgtcttttgggggcaacctcgggcgagcagtcttccaggccaaaaagaggcttcttgaacctcttggtctggttgaggaagcggctaagacggctcctggaaagaagaggcctgtagagcagtctcctcaggaaccggactcctccgcgggtattggcaaatcgggtgcacagcccgctaaaaagagactcaatttcggtcagactggcgacacagagtcagtcccagaccctcaaccaatcggagaacctcccgcagccccctcaggtgtgggatctcttacaatggcttcaggtggtggcgcaccagtggcagacaataacgaaggtgccgatggagtgggtagttcctcgggaaattggcattgcgattcccaatggctgggggacagagtcatcaccaccagcacccgaacctgggccctgcccacctacaacaatcacctctacaagcaaatctccaacagcacatctggaggatcttcaaatgacaacgcctacttcggctacagcaccccctgggggtattttgacttcaacagattccactgccacttctcaccacgtgactggcagcgactcatcaacaacaactggggattccggcctaagcgactcaacttcaagctcttcaacattcaggtcaaagaggttacggacaacaatggagtcaagaccatcgccaataaccttaccagcacggtccaggtcttcacggactcagactatcagctcccgtacgtgctcgggtcggctcacgagggctgcctcccgccgttcccagcggacgttttcatgattcctcagtacgggtatctgacgcttaatgatggaagccaggccgtgggtcgttcgtccttttactgcctggaatatttcccgtcgcaaatgctaagaacgggtaacaacttccagttcagctacgagtttgagaacgtacctttccatagcagctacgctcacagccaaagcctggaccgactaatgaatccactcatcgaccaatacttgtactatctctcaaagactattaacggttctggacagaatcaacaaacgctaaaattcagtgtggccggacccagcaacatggctgtccagggaagaaactacatacctggacccagctaccgacaacaacgtgtctcaaccactgtgactcaaaacaacaacagcgaatttgcttggcctggagcttcttcttgggctctcaatggacgtaatagcttgatgaatcctggacctgctatggccagccacaaagaaggagaggaccgtttctttcctttgtctggatctttaatttttggcaaacaaggaactggaagagacaacgtggatgcggacaaagtcatgataaccaacgaagaagaaattaaaactactaacccggtagcaacggagtcctatggacaagtggccacaaaccaccagagtgcccaagcacaggcgcagaccggctgggttcaaaaccaaggaatacttccgggtatggtttggcaggacagagatgtgtacctgcaaggacccatttgggccaaaattcctcacacggacggcaactttcacccttctccgctgatgggagggtttggaatgaagcacccgcctcctcagatcctcatcaaaaacacacctgtacctgcggatcctccaacggccttcaacaaggacaagctgaactctttcatcacccagtattctactggccaagtcagcgtggagatcgagtgggagctgcagaaggaaaacagcaagcgctggaacccggagatccagtacacttccaactattacaagcctaataatgttgaatttgctgttaatactgaaggtgtatatagtgaaccccgccccattggcaccagatacctgactcgtaatctg

SEQ ID NO: 639 - DNA, 2208 bp, synthetic construct
  misc_feature 1..2208: note = source = /note="Description of Artificial Sequence: Synthetic polynucleotide"
  source 1..2208: mol_type = other DNA
atggctgccgatggttatcttccagattggctcgaggacaaccttagtgaaggaattcgcgagtggtgggctttgaaacctggagcccctcaacccaaggcaaatcaacaacatcaagacaacgctcgaggtcttgtgcttccgggttacaaataccttggacccggcaacggactcgacaagggggagccggtcaacgcagcagacgcggcggccctcgagcacaacaaggcctacgaccagcagctcaaggccggagacaacccgtacctcaagtgcaaccacgccgacgccgagttccaggagcggctcaaagaagatacgtcttttgggggcaacctcgggcgagcagtcttccaggccaaaaagaggcctcttgaacctcttggtctggttgaggaagcggctaagacggctcctggaaagaagaggcctgtagagcagtctcctcaggaaccggactcctccgcgggtattggcaaatcgggtgcacagcccgctaaaaagagactcaatttcggtcagactggcgacacagagtcagtcccagaccctcaaccaatcggagaacctcccgcagccccctcaggtgtgagatctcttacaatggcttcaggtggtggcgcaccagtggcagacaataacgaaggtgccgatggagtgggtagttcctcgggaaattggcattgcgattcccaatggctgggggacagagtcatcaccaccagcacccgaacctgggccctgcccacctacaacaatcacctctacaagcaaatctccaacagcacatctggaggatcttcaaatgacaacgcctacctcggctacagcaccccctgggggtattttgacttcaacagattccactgccacttctcaccacgtgactggcagcgactcatcaacaacaactggggattccggcctaagcgactcaacttcaagctcttcaacattcaggtcaaagaggttacggacaacaatggagtcaagaccatcgccaataaccttaccagcacggtccaggtcttcacggactcagactatcagctcccgtacgtgctcgggtcggctcacgagggctgcctcccgccgttcccagcggacgttttcatgattcctcagtacgggtatctgacgcttaatgatggaagccaggccgtgggtcgttcgtccttttactgcctggaatatttcccgtcgcaaatgctaagaacgggtaacaacttccagttcagctacgagtttgagaacgtacctttccatagcagctacgctcacagccaaagcctggaccgactaatgaatccactcatcgaccaatacttgtactatctctcaaagactattaacggttctggacagaatcaacaaacgctaaaattcagtgtggccggacccagcaacatggctgtccagggaagaaactacatacctggacccagctaccgacaacaacgtgtctcaaccactgtgactcaaaacaacaacagcgaatttgcttggcctggagcttcttcttgggctctcaatggacgtaatagcttgatgaatcctggacctactatggccagccacaaagaaggagaggaccgtttctttcctttgtctggatctttaatttttggcaaacaaggaactggaagagacaacgtggatgcggacaaagtcatgataaccaacgaagaagaaattaaaactactaacccggtagcaacggagtcctatggacaagtggccacaaaccaccagagtgcccaagcacaggcgcagaccggctgggttcaaaaccaaggaatacttccgggtatggtttggcaggacagagatgtgtacctgcaaggacccatttgggccaaaattcctcacacggacggcaactttcacccttctccgctgatgggagggtttggaatgaagcacccgcctcctcagatcctcatcaaaaacacacctgtacctgcggatcctccaacggccttcaacaaggacaagctgaactctttcatcacccagtattctactggccaagtcagcgtggagatcgagtgggagctgcagaaggaaaacagcaagcgctggaacccggagatccagtacacttccaactattacaagtctaataatgttgaatttgctgttaatactgaaggtgtatatagtgaaccccgccccattggcaccagatacctgactcgtaatctg

SEQ ID NO: 640 - DNA, 2208 bp, synthetic construct
  misc_feature 1..2208: note = source = /note="Description of Artificial Sequence: Synthetic polynucleotide"
  source 1..2208: mol_type = other DNA
atggctgccgatggttatcttccagattggctcgaggacaaccttagtgaaggaattcgcgagtggtgggctttgaaacctggagcccctcaacccaaggcaaatcaacaacatcaagacaacgctcgaggtcttgtgcttccgggttacaaataccttggacccggcaacggactcgacaagggggagccggtcaacgcagcagacgcggcggccctcgtgcacgacaaggcctacgaccagcagctcaaggccggagacaacccgtacctcaagtgcaaccacgccgacgccgagttccaggagcggctcaaagaagatacgtcttttgggggcaacctcgggcgagcagtcttccaggccaaaaagaggcttcttgaacctcttggtctggttgaggaagcggctaagacggctcctggaaagaagaggcctgtagagcagtctcctcaggaaccggactcctccgcgggtattggcaaatcgggtgcacagcccgctaaaaagagactcaatttcggtcagactggcgacacagagtcagtcccagaccctcaaccaatcggagaacctcccgcagccccctcaggtgtgggatctcttacaatggcttcaggtggtggcgcaccagtggcagacaataacgaaggtgccgatggagtgggtagttcctcgggaaattggcattgcgattcccaatggctgggggacagagtcatcaccaccagcacccgaacctgggccctgcccacctacaacaatcacctctacaagcaaatctccaacagcacatctggaggatcttcaaatgacaacgcctacctcggctacagcaccccctgggggtattttgacttcaacagattccactgccacttctcaccacgtgactggcagcgactcatcaacaacaactggggattccggcctaagcgactcaacttcaagctcttcaacattcaggtcaaagaggttacggacaacaatggagtcaagaccatcgccaataaccttaccagcacggtccaggtcttcacggactcagactatcagctcccgtacgtgctcgggtcggctcacgagggctgcctcccgccgttcccagcggacgttttcacgattcctcagtacgggtatctgacgcttaatgatggaagccaggccgtgggtcgttcgtccttttactgcctggaatatttcccgtcgcaaatgctaagaacgggtaacaacttccagttcagctacgagtttgagaacgtacctttccatagcagctacgctcacagccaaagcctggaccgactaatgaatccactcatcgaccaatacttgtactatctctcaaagactattaacggttctggacagaatcaacaaacgctaaaattcagtgtggccggacccagcaacatggctgtccagggaagaaactacatacctggacccagctaccgacaacaacgtgtctcaaccactgtgactcaaaacaacaacagcgaatttgcttggcctggagcttcttcttgggctctcaatggacgtaatagcttgatgaatcctggacctgctatggccagccacaaagaaggagaggaccgtttctttcctttgtctggatctttaatttttggcaaacaaggaactggaagagacaacgtggatgcggacaaagtcatgataaccaacgaagaagaaattaaaactactaacccggtagcaacggagtcctatggacaagtggccacaaaccaccagagtgcccaagcacaggcgcagaccggctgggttcaaaaccaaggaatacttccgggtatggtttggcaggacagagatgtgtacctgcaaggacccatttgggccaaaattcctcacacggacggcaactttcacccttctccgctgatgggagggtttggaatgaagcacccgcctcctcagatcctcatcaaaaacacacctgtacctgcggatcctccaacggccttcaacaaggacaagctgaactctttcatcacccagtattctactggccaagtcagcgtggagatcgagtgggagctgcagaaggaaaacagcaagcgctggaacccggagatccagtacacttccaactattacaagtctaataatgttgaatttgctgttaatactgaaggtgtatatagtgaaccccgccccattgggccccgatacctgactcgtaatttt

SEQ ID NO: 641 - DNA, 2208 bp, synthetic construct
  misc_feature 1..2208: note = source = /note="Description of Artificial Sequence: Synthetic polynucleotide"
  source 1..2208: mol_type = other DNA
atggctgccgatggttatcttccagattggctcgaggacaaccttagtgaaggaattcgcgagtggtgggctttgaaacctggagcccctcaacccaaggcaaatcaacaacatcaagacaacgctcgaggtcttgtgcttccgggttacaaataccttggacccggcaacggactcgacaagggggagccggtcaacgcagcagacgcggcggccctcgagcacaacaaggcctacgaccagcagctcaaggccggagacaacccgtacctcaagtgcaaccacgccgacgccgagttccaggagcggctcaaagaagatacgtcttttgggggcaacctcgggcgagcagtcttccaggccaaaaagaggcttcttgaacctcttggtctggttgaggaagcggctaagacggctcctggaaagaagaggcctgtagagcagtctcctcaggaaccggactcctccgcgggtattggcaaatcgggtgcacagcccgctaaaaagagactcaatttcggtcagactggcgacacagagtcagtcccagaccctcaaccaatcggagaacctcccgcagccccctcaggtgtgagatctcttacaatggcttcaggtggtggcgcaccagtggcagacaataacgaaggtgccgatggagtgggtagttcctcgggaaattggcattgcgattcccaatggctgggggacagagtcatcaccaccagcacccgaacctgggccctgcccacctacaacaatcacctctacaagcaaatctccaacagcacatctggaggatcttcaaatgacaacgcctacctcggctacagcaccccctgggggtattttgacttcaacagattccactgccacttctcaccacgtgactggcagcgactcatcaacaacaactggggattccggcctaagcgactcaacttcaagctcttcaacattcaggtcaaagaggttacggacaacaatggagtcaagaccatcgccaataaccttaccagcacggtccaggtcttcacggactcagactatcagctcccgtacgtgctcgggtcggctcacgagggctgcctcccgccgttcccagcggacgttttcatgattcctcagtacgggtatctgacgcttaatgatggaagccaggccgtgggtcgttcgtccttttactgcctggaatatttcccgtcgcaaatgctaagaacgggtaacaacttccagttcagctacgagtttgagaacgtacctttccatagcagctacgctcacagccaaagcctggaccgactaatgaatccactcatcgaccaatacttgtactatctctcaaagactattaacggttctggacagaatcaacaaacgctaaaattcagtgtggccggacccagcaacatggctgtccagggaagaaactacatacctggacccagctaccgacaacaacgtgtctcaaccactgtgactcaaaacaacaacagcgaatttgcttggcctggagcttcttcttgggctctcaatggacgtaatagcttgatgaatcctggacctgctatggccagccacaaagaaggagaggaccgtttctttcctttgtctggatctttaatttttggcaaacaaggaactggaagagacaacgtggatgcggacaaagtcatgataaccaacgaagaagaaattaaaactactaacccggtagcaacggagtcctatggacaagtggccacaaaccaccagagtgcccaagcacaggcgcagaccggctgggttcaaaaccaaggaatacttccgggtatggtttggcaggacagagatgtgtacctgcaaggacccatttgggccaaaattcctcacacggacggcaactttcacccttctccgctgatgggagggtttggaatgaagcacccgcctcctcagatcctcatcaaaaacacacctgtacctgcggatcctccaacggccttcaacaaggacaagctgaactctttcatcacccagtattctactggccaagtcagcgtggagatcgagtgggagctgcagaaggaaaacagcaagcgctggaacccggagatccagtacacttccaactattacaagtctaataatgttgaatttgctgttaatactgaaggtgtatatagtgaaccccgccccattggcaccagatacctgactcgtaatctg

SEQ ID NO: 642 - DNA, 2208 bp, synthetic construct
  misc_feature 1..2208: note = source = /note="Description of Artificial Sequence: Synthetic polynucleotide"
  source 1..2208: mol_type = other DNA
atggctgccgatggttatcttccagattggctcgaggacaaccttagtgaaggaattcgcgagtggtgggctttgaaacctggagcccctcaacccaaggcaaatcaacaacatcaagacaacgctcgaggtcttgtgcttccgggttacaaataccttggacccggcaacggactcgacaagggggagccggtcaacgcagcagacgcggcggccctcgagcacgacaaggcctacgaccagcagctcaaggccggagacaacccgtacctcaagtgcaaccacgccgacgccgagttccaggagcggctcaaagaagatacgtcttttgggggcaacctcgggcgagcagtcttccaggccaaaaagaggcttcttgaacctcttggtctggttgaggaagcggctaagacggctcctggaaagaagaggcctgtagagcagtctcctcaggaaccggactcctccgcgggtattggcaaatcgggtgcacagcccgctaaaaagagactcaatttcggtcagactggcgacacagagtcagtcccagaccctcaaccaatcggagaacctcccgcagccccctcaggtgtgggatctcttacaatggcttcaggcggtggcgcaccagtggcagacaataacgaaggtgccgatggagtgggtagttcctcgggaaattggcattgcgattcccaatggctgggggacagagtcatcaccaccagcacccgaacctgggccctgcccacctacaacaatcacctctacaagcaaatctccaacagcacatctggaggatcttcaaatgacaacgcctacctcggctacagcaccccctgggggtattttgacttcaacagattccactgccacttctcaccacgtgactggcagcgactcatcaacaacaactggggattccggcctaagcgactcaacttcgagctcttcaacattcaggtcaaagaggttacggacaacaatggagtcaagaccatcgccaataaccttaccagcacggtccaggtcttcacggactcagactatcagctcccgtacgtgctcgggtcggctcacgagggctgcctcccgccgttcccagcggacgttttcatgattcctcagtacgggtatctgacgcttaatgatggaagccaggccgtgggtcgttcgtccttttactgcctggaatatttcccgtcgcaaatgctaagaacgggtaacaacttccagtccagctacgagtttgagaacgtacctttccatagcagctacgctcacagccaaagcctggaccgactaatgaatccactcatcgaccaatacttgtactatctctcaaagactattaacggttctggacagaatcaacaaacgctaaaattcagtgtggccggacccagcaacatggctgtccagggaagaaactacatacctggacccagctaccgacaacaacgtgcctcaaccactgtgactcaaaacaacaacagcgaatttgcttggcctggagcttcttcttgggctctcaatggacgtaatagcttgatgaatcctggacctgctatggccagccacaaagaaggggaggaccgtttctttcctttgtctggatctttaatttttggcaaacaaggaactggaagagacaacgtggatgcggacaaagtcatgataaccaacgaagaagaaattaaaactactaacccggtagcaacggagtcctatggacaagtggccacaaaccaccagagtgcccaagcacaggcgcagaccggctgggttcaaaaccaaggaatacttccgggtatggtttggcaggacagagatgtgtacctgcaaggacccatttgggccaaaattcctcacacggacggcaactttcacccttctccgctgatgggagggtttggaatgaagcacccgcctcctcagatcctcatcaaaaacacacctgtacctgcggatcctccaacggccttcaacaaggacaagctgaactctttcatcacccagtattctactggccaagtcagcgtggagatcgagtgggagctgcagaaggaaaacagcaagcgctggaacccggagatccagtacacttccaactattacaagtctaataatgttgaatttgctgttaatactgaaggtgtatatagtgaaccccgccccattggcaccagatacctgactcgtaatctg

SEQ ID NO: 643 - DNA, 2208 bp, synthetic construct
  misc_feature 1..2208: note = source = /note="Description of Artificial Sequence: Synthetic polynucleotide"
  source 1..2208: mol_type = other DNA
atggctgccgatggttatcttccagattggctcgaggacaaccttagtgaaggaattcgcgagtggtgggctttgaaacctggagcccctcaacccaaggcaaatcaacaacatcaagacaacgctcgaggtcttgtgcttccgggttacaaataccttggacccggcaacggactcgacaagggggagccggtcaacgcagcagacgcggcggccctcgagcacgacaaggcctacgaccagcagctcaaggccggagacaacccgtacctcaagtgcaaccacgccgacgccgagttccaggagcggctcaaagaagatacgtcttttgggggcaacctcgggcgagcagtcttccaggccaaaaagaggcttcttgaacctcttggtctggttgaggaagcggctaagacggctcctggaaagaagaggcctgtagagcagtctcctcaggaaccggactcctccgcgggtattggcaaatcgggtgcacagcccgctaaaaagagactcaatttcggtcagactggcgacacagagtcagtcccagaccctcaaccaatcggagaacctcccgcagcccccccaggtgtgggatctcttacaatggcttcaggtggtggcgcaccagtggcggacaataacgaaggtgccgatggagtgggtagttcctcgggaaattggcattgcgattcccaatggctgggggacagagtcatcaccaccagcacccgaacctgggccctgcccacctacaacaatcacctctacaagcaaatctccaacagcacatctggaggatcttcaaatgacaacgcctacctcggctacagcaccccctgggggtattttgacttcaacagattccactgccacttctcaccacgtgactggcagcgactcatcaacaacaactggggattccggcctaagcgactcaacttcaagctcttcaacattcaggtcaaagaggttacggacaacaatggagtcaagaccatcgccaataaccttaccagcacggtccaggtcttcacggactcagactatcagctcccgtacgtgctcgggtcggctcacgagggctgcctcccgccgttcccagcggacgttttcatgattcctcagtacgggtatctgacgcttaatgatggaagccaggccgtgggtcgttcgtccttttactgcctggaatatttcccgtcgcaaatgctaagaacgggtaacaacttccagttcagctacgagtttgagaacgtacctttccatagcagctacgctcacagccaaagcctggaccgactaatgaatccactcatcgaccaatacttgtactatctctcaaagactattagcggttctggacagaatcaacaaacgctaaaattcagtgtggccggacccagcaacatggctgtccagggaagaaactacatacctggacccagctaccgacaacaacgtgtctcaaccactgtgactcaaaacaacagcagcgaatttgcttggcctggagcttcttcttgggctctcaatggacgtaatagcttgatgaatcctggacctgctatggccagccacaaagaaggagaggaccgtttctttcctttgtctggatctttaatttttggcaaacaaggaactggaagagacaacgtggatgcggacaaagtcatgataaccaacgaagaagaaattaaaactactaacccggtagcaacggagtcctatggacaagtggccacaaaccaccagagtgcccaagcacaggcgcagaccggctgggttcaaaaccaaggaatactttcgggtatggtttggcaggacagagatgtgtacctgcaaggacccatttgggccaaaattcctcacacggacggcaactttcacccttctccgctgatgggagggtttggaatgaagcacccgcctcctcagatcctcatcaaaaacacacctgtacctgcggatcctccaacggccttcaacaaggacaagctgaactctttcatcacccagtattctactggccaagtcagcgtggagatcgagtgggagctgcagaaggaaaacagcaagcgctggaacccggagatccagtacacttccaactattacaagtctaataatgttgaatttgctgttaatactgaaggtgtatatagtgaaccccgccccattggcaccagatacctgactcgtaatctg

SEQ ID NO: 644 - DNA, 2208 bp, synthetic construct
  misc_feature 1..2208: note = source = /note="Description of Artificial Sequence: Synthetic polynucleotide"
  source 1..2208: mol_type = other DNA
atggctgccgatggttatcttccagattggctcgaggacaaccttagtgaaggaattcgcgagtggtgggctttgaaacctggagcccctcaacccaaggcaaatcaacaacatcaagacaacgctcgaggtcttgtgcttccgggttacaaataccttggacccggcaacggactcgacaagggggagccggtcaacgcagcagacgcggcggccctcgagcacgacaaggcctacgaccagcagctcaaggccggagacaacccgtacctcaagtgcaaccacgccgacgccgagttccaggagcggctcaaagaagatacgtcttttgggggcaacctcgggcgagcagtcttccaggccaaaaagaggcttcttgaacctcttggtctggttgaggaagcggctaagacggctcctggaaagaagaggcctgtagagcagtctcctcaggaaccggactcctccgcgggtattggcaaatcgggtgcacagcccgctaaaaagagactcaatttcggtcagactggcgacacagagtcagtcccagaccctcaaccaatcggagaacctcccgcagccccctcaggtgtgggatctcttacaatggcttcaggtggtggcgcaccagtggcagacaataacgaaggtgccgatggagtgggtagttcctcgggaaattggcattgcgattcccaatggctgggggacagagtcatcaccaccagcacccgaacctgggccctgcccacctacaacaatcacctctacaagcaaatctccaacagcacatctggaggatcttcaaatgacaacgcctacctcggctacagcaccccctgggggtattttgacttcaacagattccactgccacttctcaccacgtgactggcagcgactcatcaacaacaactggggattccggcctaagcgactcaacttcaagctcttcaacattcaggtcaaagaggttacggacaacaatggagtcaagaccatcgccaataaccttaccagcacggtccaggtcttcacggactcagactatcagctcccgtacgtgctcgggtcggctcacgagggctgcctcccgccgttcccagcggacgttttcatgattcctcagtacgggtatctgacgcttaatgatggaagccaggccgtgggtcgttcgtccttttactgcctggaatatttcccgtcgcaaatgctaagaacgggtaacaacttccagttcagctacgagtttgagaacgtacctttccatagcagctacgctcacagccaaagcctggaccgactaatgaatccactcatcgaccaatacttgtactatctctcaaagactattaacggttctggacagaatcaacaaacgctaaaattcagtgtggccggacccagcaacatggctgtccagggaagaaactacatacctggacccagctaccgacaacaacgtgtctcaaccactgtgactcaaaacaacaacagcgaatttgcttggcctggagcttcttcttgggctctcaatggacgtaatagcttgatgaatcctggacctgctatggccagccacaaagaaggagaggaccgtttctttcctttgtctggatctttaatttttggcaaacaaggaactggaagagacaacgtggatgcggacaaagtcatgataaccaacgaagaagaaattaaaactactaacccggtagcaacggagtcctatggacaagtggccacaaaccaccagagtgcccaagcacaggcgcagaccggctgggttcaaaaccaaggaatacttccgggtatggtttggcaggacagagatgtgtacctgcaaggacccatttgggccaaaattcctcacacggacggcaactttcacccttctccgctgatgggagggtttggaatgaagcacccgcctcctcagatcctcatcaaaaacacacctgtacctgcggatcctccaacggccttcaacaaggacaagctgaactctttcatcacccagtattctactggccaagtcagcgtggagatcgagtgggagctgcagaaggaaaacagcaagcgctggaacccggagatccagtacacttccaactattacaagtctaataatgttgaatttgctgttaatactgaaggtgtatatagtgaaccccgccccattggcaccagatacctgactcgtaatctg

SEQ ID NO: 645 - DNA, 2208 bp, synthetic construct; identical to SEQ ID NO: 644
  misc_feature 1..2208: note = source = /note="Description of Artificial Sequence: Synthetic polynucleotide"
  source 1..2208: mol_type = other DNA

SEQ ID NO: 646 - DNA, 2208 bp, synthetic construct
  misc_feature 1..2208: note = source = /note="Description of Artificial Sequence: Synthetic polynucleotide"
  source 1..2208: mol_type = other DNA
atggctgccgatggttatcttccagattggctcgaggacaaccttagtgaaggaattcgcgagtggtgggctttgaaacctggagcccctcaacccaaggcaaatcaacaacatcaagacaacgctcgaggtcttgtgcttccgggttacaaataccttggacccggcaacggactcgacaagggggagccggtcaacgcagcagacgcggcggccctcgagcacgacaaggcctacgaccagcagctcaaggccggagacaacccgtacctcaagtgcaaccacgccgacgccgagttccaggagcggctcaaagaagatacgtcttttgggggcaacctcgggcgagcagtcttccaggccaaaaagaggcttcttgaacctcttggtctggttgaggaagcggctaagacggctcctggaaagaagaggcctgtagagcagtctcctcaggaaccggactcctccgcgggtattggcaaatcgggtgcacagcccgctaaaaagagactcaatttcggtcagactggcgacacagagtcagtcccagaccctcaaccaatcggagaacctcccgcagccccctcaggtgtgggatctcttacaatggcttcaggtggtggcgcaccagtggcagacaataacgaaggtgccgatggagtgggtagttcctcgggaaattggcattgcgattcccaatggctgggggacagagtcatcaccaccagcacccgaacctgggccctgcccacctacaacaatcacctctacaagcaaatctccaacagcacatctggaggatcttcaaatgacaacgcctacctcgactacagcaccccctgggggtattttgacttcaacagattccactgccacttctcaccacgtgactggcagcggctcatcaacaacaactggggattccggcctaagcgactcaacttcaagctcttcaacattcaggtcaaagaggttacggacaacaatggagtcaagaccatcgccaataaccttaccagcacggtccaggtcttcacggactcagactatcagctcccgtacgtgctcgggtcggctcacgagggctgcctcccgccgttcccagcggacgttttcatgattcctcagtacgggtatctgacgcttaatgatggaagccaggccgtgggtcgttcgtccttttactgcctggaatatttcccgtcgcaaatgctaagaacgggtaacaacttccagttcagctacgagtttgagaacgtacctttccatagcagctacgctcacagccaaagcctggaccgactaatgaatccactcatcgaccaatacttgtactatctctcaaagactattaacggttctggacagaatcaacaaacgctaaaattcagtgtggccggacccagcaacatggctgtccagggaagaaactacatacctggacccagctaccgacaacaacgtgtctcaaccactgtgactcaaaacaacaacagcgaatttgcttggcctggagcttcttcttgggctctcaatggacgtaatagcttgatgaatcctggacctgctatggccagccacaaagaaggagaggaccgtttctttcctttgtctggatctttaatttttggcaaacaaggaactggaagagacaacgtggatgcggacaaagtcatgataaccaacgaagaagaaattaaaactactaacccggtagcaacggagtcctatggacaagtggccacaaaccaccagagtgcccaagcacaggcgcagaccggctgggttcaaaaccaaggaatacttccgggtatggtttggcagggcagagatgtgtacctgcaaggacccatttgggccaaaattcctcacacggacggcaactttcacccttctccgctgatgggagggtttggaatgaagcacccgcctcctcagatcctcatcaaaaacacacctgtacctgcggatcctccaacggccttcaacaaggacaagctgaactctttcatcacccagtattctactggccaagtcagcgtggagatcgagtgggagctgcagaaggaaaacagcaagcgctggaacccggagatccagtacacttccaactattacaagtctaataatgttgaatttgctgttaatactgaaggtgtatatagtgaaccccgccccattggcaccagatacctgactcgtaatctg

SEQ ID NO: 647 - DNA, 2208 bp, synthetic construct; identical to SEQ ID NO: 644
  misc_feature 1..2208: note = source = /note="Description of Artificial Sequence: Synthetic polynucleotide"
  source 1..2208: mol_type = other DNA

SEQ ID NO: 648 - DNA, 2208 bp, synthetic construct
  misc_feature 1..2208: note = source = /note="Description of Artificial Sequence: Synthetic polynucleotide"
  source 1..2208: mol_type = other DNA
atggctgccgatggttatcctccagattggctcgaggacaaccttagtgaaggaattcgcgagtggtgggctttgaaacctggagcccctcaacccaaggcaaatcaacaacatcaagacaacgctcgaggtcttgtgcttccgggttacaaataccttggacccggcaacggactcgacaagggggagccggtcaacgcagcagacgcggcggccctcgagcacgacaaggcctacgaccagcagctcaaggccggggacaacccgcacctcaagtacaaccacgccgacgccgagttccaggagcggctcaaagaagatacgtcttttgggggcaacctcgggcgagcagtcttccaggccaaaaagaggcttcttgaacctcttggtctggttgaggaagcggctaagacggctcctggaaagaagaggcccgtagagcagtctcctcaggaaccggactcctccgcgggtattggcaaatcgggtgcacagcccgctaagaagagactcaatttcggtcagactggcgacactgagtcagtcccagaccctcaaccaatcggagaacctcccgcagccccctcaggtgtgggatctcttacaatggcttcaggtggtggcgcaccagtggcagacaataacgaaggtgccgatggagtgggtagttcctcgggaaattggcattgcgattcccaatggctgggggacagagtcatcaccaccagcacccgaacctgggccctgcccacctacaacaatcacctctacaagcaaatctccaacagcacatctggaggatcttcaaatgacaacgcctacttcggctacagcaccccctgggggtattttgacttcaacagattccactgccacttctcaccacgtgactggcagcgactcatcaacaacaactggggattccggcctaagcgactcaacttcaagctcttcaacattcaggtcaaagaggttacggacaacaatggagtcaagaccatcgccaataaccttaccagcacggtccaggtcttcacggactcagactatcagctcccgtacgtgctcgggtcggctcacgagggctgcctcccgccgttcccagcggacgttttcatgattcctcagtacgggtatctgacgcttaatgatggaagccaggccgtgggtcgttcgtccttttactgcctggaatatttcccgtcgcaaatgctaagaacgggtaacaacttccagttcagctacgagtttgagaacgtacctttccatagcagctacgctcacagccaaagcctggaccgactaatgaatccactcatcgaccaatacttgtactatctctcaaagactattaacggttctggacagaatcaacaaacgctaaaattcagtgtggccggacccagcaacatggctgtccagggaagaaactacatacctggacccagctaccgacaacaacgtgtctcaaccactgtgactcaaaacaacaacagcgaatttgcttggcctggagcttcttcttgggctctcaatggacgtaatagcttgatgaatcctggacctgctatggccagccacaaagaaggagaggaccgtttctttcctttgtctggatctttaatttttggcaaacaaggaactggaagagacaacgtggatgcggacaaagtcatgataaccaacgaagaagaaattaaaactactaacccggtagcaacggagtcctatggacaagtggccacaaaccaccagagtgcccaagcacaggcgcagaccggctgggttcaaaaccaaggaatacttccgggtatggtttggcaggacagagatgtgtacctgcaaggacccatttgggccaaaattcctcacacggacggcaactttcacccttctccgctgatgggagggtttggagtgaagcacccgcctcctcagatcctcatcaaaaacacacctgtacctgcggatcctccaacggccttcaacaaggacaggctgaactctttcatcacccagtattctactggccaagtcagcgtggagatcgagtgggagctgcagaaggaaaacagcaagcgctggaacccggagatccagtacacttccaactattacaagtctaataatgttgaatttgctgttaatactgaaggtgtatatagtgaaccccgccccattggcaccagatacctgactcgtaatctg

SEQ ID NO: 649 - DNA, 2208 bp, synthetic construct
  misc_feature 1..2208: note = source = /note="Description of Artificial Sequence: Synthetic polynucleotide"
  source 1..2208: mol_type = other DNA
atggctgccgatggttatcttccagattggctcgaggacaaccttagtgaaggaattcgcgagtggtgggctttgaaacctggagcccctcaacccaaggcaaatcaacaacatcaagacaacgctcgaggtcttgtgcttccgggttacaaataccttggacccggcaacggactcgacaagggggagccggtcaacgcagcagacgcggcggccctcgagcacgacaaggcctacgaccagcagctcaaggccggagacaacccgtacctcaagtacaaccacgccgacgccgagttccaggagcggctcaaagaagatacgtcttttgggggcaacctcgggcgagcagtcttccaggccaaaaagaggcttcttgaacctcttggtctggttgaggaagcggctaagacggctcctggaaagaagaggcctgtagagcagtctcctcaggaaccggactcctccgcgggtattggcaaatcgggtgcacagcccgctaaaaagagactcaatttcggtcagactggcgacacagagtcagtcccagaccctcaaccaatcggagaacctcccgcagccccctcaggtgtgggatctcttacaatggcttcaggtggtggcgcaccagtggcggacaataacgaaggtgccgatggagtgggtagttcctcgggaaattggcattgcgattcccaatggctgggggacagagtcatcaccaccagcacccgaacctgggccctgcccacctacaacaatcacctctacaagcaaatctccaacagcacatctggaggatcttcaaatgacaacgcctacttcggctacagcaccccctgggggtattttgacttcaacagattccactgccacttctcaccacgtgactggcagcgactcatcaacaacaactggggattccggcctaagcgactcaacttcaagctcttcaacattcaggtcaaagaggttacggacaacaatggagtcaagaccatcgccaataaccttaccagcacggtccaggtcttcacggactcagactatcagctcccgtacgtgctcgggtcggctcacgagggctgcctcccgccgttcccagcggacgttttcatgattcctcagtacgggtatctgacgcttaatgatggaagccaggccgtgggtcgttcgtccttttactgcctggaatatttcccgtcgcaaatgctaagaacgggtaacaacttccagttcagctacgagtttgagaacgtacctttccatagcagctacgctcacagccaaagcctggaccgactaatgaatccactcatcgaccaatacttgtactatctctcaaagactattaacggttctggacagaatcaacaaacgctaaaattcagtgtggccggacccagcaacatggctgtccagggaagaaactacatacctggacccagctaccgacaacaacgtgtctcaaccactgtgactcaaaacaacaacagcgaatttgcttggcctggagcttcttcttgggctctcaatggacgtaatagtttgatgaatcctggacctgctatggccagccacaaagaaggagaggaccgtttctttcctttgtctggatctttaatttttggcaaacaaggaactggaagagacaacgtggatgcggacaaagtcatgataaccaacgaagaagaaattaaaactactaacccggtagcaacggagtcctatggacaagtggccacaaaccaccagagtgcccaagcacaggcgcagaccggctgggttcaaaaccaaggaatacttccgggtatggtttggcaggacagagatgtgtacctgcaaggacccatttgggccaaaattcctcacacggacggcaactttcacccttctccgctgatgggagggtttggagtgaagcacccgcctcctcagatcctcatcaaaaacacacctgtacctgcggatcctccaacggccttcaacaaggacaagctgaactctttcatcacccagtattctactggccaagtcagcgtggagatcgagtgggagctgcagaaggaaaacagcaagcgctggaacccggagatccagtacacttccaactattacaagtctaataatgttgaatttgctgttaatactgaaggtgtatatagtgaaccccgccccattggcaccagatacctgactcgtaatctg

SEQ ID NO: 650 - DNA, 2208 bp, synthetic construct
  misc_feature 1..2208: note = source = /note="Description of Artificial Sequence: Synthetic polynucleotide"
  source 1..2208: mol_type = other DNA
atggctgccgatggttatcttccagattggctcgaggacaaccttagtgaaggaattcgcgagtggtgggctttgaaacctggagcccctcaacccaaggcaaatcaacaacatcaagacaacgctcgaggtcttgtgcttccgggttacaaataccttggacccggcaacggactcgacaagggggagccggtcaacgcagcagacgcggcggccctcgagcacgacaaggcctacgaccagcagctcaaggccggagacaacccgtacctcaagtacaaccacgccgacgccgagttccaggagcggctcaaagaagatacgtcttttgggggcaacctcgggcgagcagtcttccaggccaaaaagaggcttcttgaacctcttggtctggttgaggaagcggctaagacggctcctggaaagaagaggcctgtagagcagtctcctcaggaaccggactcctccgcgggtattggcaaatcgggtgcacagcccgctaaaaagagactcaatttcggtcagactggcgacacagagtcagtcccagaccctcaaccaatcggagaacctcccgcagccccctcaggtgtgggatctcttacaatggcttcaggtggtggcgcaccagtggcagacaataacgaaggtgccgatggagtgggtagttcctcgggaaattggcattgcgattcccaatggctgggggacagagtcatcaccaccagcacccgaacctgggccctgcccacttacaacaatcacctctacaagcaaatctccaacagcacatctggaggatcttcaaatgacaacgcctacttcggctacagcaccccctgggggtattttgacttcaacagattccactgccacttctcaccacgtgactggcagcgactcaccaacaacaactggggattccggcctaagcgactcaacttcaagctcttcaacattcaggtcaaagaggttacggacaacaatggagtcaagaccatcgccaataaccttaccagcacggtccaggtcttcacggactcagactatcagctcccgtacgtgctcgggtcggctcacgagggctgcctcccgccgttcccagcggacgttttcatgattcctcagtacgggtatctgacgcttaatgatggaagccaggccgtgggtcgttcgtccttttactgcctggaatatatcccgtcgcaaatgctaagaacgggtaacaacttccagttcagctacgagtttgagaacgtacctttccatagcagctacgctcacagccaaagcctggaccgactaatgaatccactcatcgaccaatacttgtactatctctcaaagactattaacggttctggacagaatcaacaaacgctaaaattcagtgtggccggacccagcaacatggctgtccagggaagaaactacatacctggacccagctaccgacaacaacgtgtctcaaccactgtgactcaaaacaacaacagcgaatttgcttggcctggagcttcttcttgggctctcaatggacgtaatagcttgatgaatcctggacctgctatggccagccacaaagaaggagaggaccgtttctttcctttgtctggatctttaatttttggcaaacaaggaactggaagagacaacgtggatgcggacaaagtcatgataaccaacgaagaagaaattaaaactactaacccggtagcaacggagtcctatggacaagtggccacaaaccaccagagtgcccaagcacaggcgcagaccggctgggttcaaaaccaaggaatacttccgggtatggtttggcaggacagagatgtgtacctgcaaggacccatttgggccaaaattcctcacacggacggcaactttcacccttctccgctgatgggagggtttggagtgaagcacccgcctcctcagatcctcatcaaaaacacacctgtacctgcggatcctccaacggccttcaacaaggacaagctgaactctttcatcacccagtattctactggccaagtcagcgtggagatcgagtgggagctgcagaaggaaaacagcaagcgctggaacccggagatccagtacacttccaactattacaagtctaataatgttgaatttgctgttaatactgaaggtgtatatagtgaaccccgccccattggcaccagatacctgactcgtaatctg

SEQ ID NO: 651 - DNA, 2208 bp, synthetic construct
  misc_feature 1..2208: note = source = /note="Description of Artificial Sequence: Synthetic polynucleotide"
  source 1..2208: mol_type = other DNA
atggctgccgatggttatcttccagattggctcgaggacaaccttagtgaaggaattcgcgagtggtgggctttgaaacctggagcccctcaacccaaggcaaatcaacaacatcaagacaacgctcgaggtcttgtgcttccgggttacaaataccttggacccggcaacggactcgacaagggggagccggtcaacgcagcagacgcggcggccctcgagcacgacaaggcctacgaccagcagctcaaggccggagacaacccgtacctcaagtacaaccacgccgacgccgagttccaggagcggctcaaagaagatacgtcttttgggggcaacctcgggcgagcagtcttccaggccaaaaagaggcttcttgaacctcttggtctggttgaggaagcggctaagacggctcctggaaagaagaggcctgtagagcagtctcctcaggaaccggactcctccgcgggtattggcaaatcgggtgcacagcccgctaaaaagagactcaatttcggtcagactggcgacacagagtcagtcccagaccctcaaccaatcggagaacctcccgcagccccctcaggtgtgggatctcttacaatggcttcaggtggtggcgcaccagtggcagacaataacgaaggtgccgatggagtgggtagttcctcgggaaattggcattgcgattcccaatggctgggggacagagtcatcaccaccagcacccgaacctgggccctgcccacctacaacaatcacctctacaagcaaatctccaacagcacatctggaggatcttcaaatgacaacgcctacttcggctacagcaccccctgggggtattttgacttcaacagattccactgccacttctcaccacgtgactggcagcgactcatcaacaacaactggggattccggcctaagcgactcaacttcaagctcttcaacattcaggtcaaagaggttacggacaacaatggagtcaagaccatcgccaataaccttaccagcacggtccaggtcttcacggactcagactatcagctcccgtacgtgctcgggtcggctcacgagggctgcctcccgccgttcccagcggacgttttcatgattcctcagtacgggtatctgacgcttaatgatggaagccaggccgtgggtcgttcgtccttttactgcctggaatatttcccgtcgcaaatgctaagaacgggtaacaacttccagtttagctacgagtttgagaacgtacctttccatagcagctacgctcacagccaaagcctggaccgactaatgaatccactcatcgaccaatacttgtactatctctcaaagactattaacggttctggacagaatcaacaaacgctaaaattcagtgtggccggacccagcaacatggctgtccagggaagaaactacatacctggacccagctaccgacaacaacgtgtctcaaccactgtgactcaaaacaacaacagcgaatttgcttggcctggagcttcttcttgggctctcaatggacgtaatagcttgatgaatcctggacctgctatggccagccacaaagaaggagaggaccgtttctttcctttgtctggatctttaatttctggcaaacaaggaactggaagagacaacgtggatgcgaacaaagtcatgataaccaacgaagaagaaattaaaactactaacccggtagcaacggagtcctatggacaagtggccacaaaccaccagagtgcccaagcacaggcgcagaccggctgggttcaaaaccaaggaatacttccgggtatggtttggcaggacagagatgtgtacctgcaaggacccatttgggccaaaattcctcacacggacggcaactttcacccttctccgctgatgggagggtttgaaatgaagcacccgcctcctcagatcctcatcaaaaacacacctgtacctgcggatcctccaacggccttcaacaaggacaagctgaactctttcatcacccagtattctactggccaagtcagcgtggagatcgagtgggagctgcagaaggaaaacagcaagcgctggaacccggagatccagtacacttccaactattacaagtctaataatgttgaatttgctgttaatactgaaggtgtatatagtgaaccccgccccattggcaccagatacctgactcgtaatctg

SEQ ID NO: 652 - DNA, 2208 bp, synthetic construct
  misc_feature 1..2208: note = source = /note="Description of Artificial Sequence: Synthetic polynucleotide"
  source 1..2208: mol_type = other DNA
atggctgccgatggttatcttccagattggctcgaggacaaccttagtgaaggaattcgcgagtggtgggctttgaaacctggagcccctcaacccaaggcaaatcaacaacatcaagacaacgctcgaggtcttgtgcttccgggttacaaataccttggacccggcaacggactcgacaagggggagccggtcaacgcagcagacgcggcggccctcgagcacgacaaggcctacgaccagcagctcaaggccggagacaacccgtacctcaagtacaaccacgccgacgccgagttccaggagcggctcaaagaagatacgtcttttgggggcaacctcgggcgagcagtcttccaggccaaaaagaggcttcttgaacctcttggtctggttgaggaagcggctaagacggctcctggaaagaagaggcctgtagagcagtctcctcaggaaccggactcctccgcgggtattggcaaatcgggtgcacagcccgctaaaaagagactcaatttcggtcagactggcgacacagagtcagtcccagaccctcaaccaatcggagaacctcccgcagccccctcaggtgtgggatctcttacaatagcttcaggtggtggcgcaccagtggcagacaataacgaaggtgccgatggagtgggtagttcctcgggaaattggcattgcgattcccaatggctgggggacagagtcatcaccaccagcacccgaacctgggccctgcccacctacaacaatcacctctacaagcgaatctccaacagcacatctggaggatcttcaaatgacaacgcctacttcggctacagcaccccctgggggtattttgacttcaacagattccactgccacttctcaccacgtgactggcagcgactcatcaacaacaactggggattccggcctaagcgactcaacttcaagcttttcaacattcgggtcaaagaggttacggacaacaatggagtcaagaccatcaccaataaccttaccagcacggtccaggtcttcacggactcagactatcagctcccgtacgtgcttgggtcggctcacgagggctgcctcccgccgttcccagcggacgttttcatgattcctcagtacgggtatctgacgcttaatgatggaagccaggccgtgggtcgttcgtccttttactgcctggaatatttcccgtcgcaaatgctaagaacgggtaacaacttccagttcagctacgagtttgagaacgtacctttccatagcagctacgctcacagccaaagcctggaccgactaatgaatccactcatcgaccaatacttgtactatctctcaaagactattaacggttctggacagaatcaacaaacgctaaaattcagtgtggccggacccagcaacatggctgtccagggaagaaactacatacctggacccagctaccgacaacaacgtgtctcaaccactgtgactcgaaacaacaacagcgaatttgcttggcctggagcttcttcttgggctctcaatggacgtaatagcttgatgaatcctggacctgctatggccagccacaaagaaggagaggaccgtttctttcctttgtctggatctttaatttttggcaaacaaggaactggaagagacaacgtggatgcggacaaagtcatgataaccaacgaagaagaaattaaaactactaacccggtagcaacggagtcctatggacaagtggccacaaaccaccagagtgcccaagcacaggcgcagaccggctgggttcaaaaccaaggaatacttccgggtatggtttggcaggacagagatgtgtacctgcaaggacccatttgggccaaaattcctcacacggacggcaactttcacccttctccgctgatgggagggtttggagtgaagcacccgcctcctcagatcctcatcaaaaacacacctgtacctgcggatcctccaacggccttcaacaaggacaagctgaactctttcatcacccagtattctactggccaagtcagcgtggagatcgagtgggagctgcagaaggaaaacagcaagcgctggaacccggagatccagtacacttccaactattacaagtctaataatgttgaatttgctgttaatactgaaggtgtatatagtgaaccccgccccattggcaccagatacctgactcgtaatctg

SEQ ID NO: 653 - DNA, 2208 bp, synthetic construct
  misc_feature 1..2208: note = source = /note="Description of Artificial Sequence: Synthetic polynucleotide"
  source 1..2208: mol_type = other DNA
atggctgccgatggttatcttccagattggctcgaggacaaccttagtgaaggaattcgcgagtggtgggctttgaaacctggagcccctcaacccaaggcaaatcaacaacatcaagacaacgctcgaggtcttgtgcttccgggttacaaataccttggacccggcaacggactcgacaagggggagccggtcaacgcagcagacgcggcggccctcgagcacgacaaggcctacgaccagcagctcaaggccggagacaacccgtacctcaagtacaaccacgccgacgccgagttccaggagcggctcaaagaagatacgtcttttgggggcaacctcgggcgagcagtcttccaggccaaaaagaggcttcttgaacctcttggtctggttgaggaagcggctaagacggctcctggaaagaagaggcctgtagagcagtctcctcaggaaccggactcctccgcgggtattggcaaatcgggcgcacagcccgctaaaaagagactcaatttcggtcagactggcgacacagagccagtcccagaccctcaaccaatcggagaacctcccgcagccccctcaggtgtgggatctcttacaatggcttcaggtggtggcgcaccagtggcagacaataacgaaggtgccgatggagtgggtagttcctcgggaaattggcattgcgattcccaatggctgggggacagagtcatcaccaccagcacccgaacctgggccctgcccacctacaacaatcacctctacaagcaaatctccaacagcacatctggaggatcttcaaatgacaacgcctacttcggctacagcaccccctgggggtattttgacttcaacagattccactgccacttctcaccacgtgactggcagcgactcatcaacaacaactggggattccggcctaagcgactcaacttcaagctcttcaacattcaggtcaaagaggttacggacaacaatggagtcaagaccatcgccaataaccttaccagcacggtccaggtcttcacggactcagactatcagctcccgtacgtgctcgggtcggctcacgagggctgcctcccgccgttcccagcgggcgttttcatgattcctcagtacgggtatctgacgcttaatgatggaagccaggccgtgggtcgttcgtccttttactgcctggaatatttcccgtcgcaaatgctaagaacgggtaacaacttccagttcagctacgagtttgagaacgtacctttccatagcagctacgctcacagccaaagcctggaccgactaatgaatccactcatcgaccaatacttgtactatctctcaaagactattaacggttctggacagaatcaacaaacgctaaaattcagtgtggccggacccagcaacatggctgtccagggaagaaactacatacctggacccagctaccgacaacaacgtgtctcaaccactgcgactcaaaacaacaacagcgaatttgcttggcctggagcttcttcttgggctctcaatggacgtaatagcttgatgaatcctggacctgctatggccagccacaaagaaggagaggaccgtttctttcctttgtctggatctttaatttttggcaaacaaggaactggaagagacaacgtggatgcggacaaagtcatgataaccaacgaagaagaaattaaaactactaacccggtagcaacggagtcctatggacaagtggccacaaaccaccagagtgcccaagcacaggcgcagaccggctgggttcaaaaccaaggaatacttccgggtatggtttggcaggacagagatgtgtacctgcaaggacccatttgggccaaaattcctcacacggacggcaactttcacccttctccgctgatgggagggtttggaatgaagcacccgcctcctcagatcctcatcaaaaacacacctgtacctgcggatcctccaacggccttcaacaaggacaagctgaactctttcatcacccagtattctactggccaagtcagcgtggagatcgagtgggagctgcagaaggaaaacagcaagcgctggaacccggagatccagtacacttccaactattacaagtctaataatgttgaatttgctgttaatactgaaggtgtatatagtgaaccccgccccattggcaccagatacctgactcgtaatctg

SEQ ID NO: 654 - DNA, 2208 bp, synthetic construct
  misc_feature 1..2208: note = source = /note="Description of Artificial Sequence: Synthetic polynucleotide"
  source 1..2208: mol_type = other DNA
atggctgccgatggttatcttccagattggctcgaggacaaccttagtgaaggaattcgcgagtggtgggctttgaaacctggagcccctcaacccaaggcaaatcaacaacatcaagacaacgctcgaggtcttgtgcttccgggttacaaataccttggacccggcaacggactcgacaagggggagccggtcaacgcagcagacgcggcggccctcgagcacgacaaggcctacgaccagcagctcaaggccggagacaacccgtacctcaagtacaaccacgccgacgccgggttccaggagcggctcaaagaagatacgtcttttgggggcaacctcgggcgagcagtcttccaggccaaaaagaggcttcttgaacctcttggtctggttgaggaagcggctaagacggctcctggaaagaagaggcctgtagagcagtctcctcaggaaccggactcctccgcgggtattggcaaatcgggtgcacagcccgctaaaaagagactcaatttcggtcagactggcgacacagagtcagtcccagtccctcaaccaatcggagaacctcccgcagccccctcaggtgtgggatctcttacaatggcttcaggtggtggcgcaccagtggcagacaataacgaaggtgccgatggagtgggtagttcctcgggaaattggcattgcgattcccaatggctgggggacagagtcatcaccaccagcacccgaacctgggccctgcccacctacaacaatcacctctacaagcaaatctccaacagcacatctggaggatcttcaaatgacaacgcctacttcggctacagcaccccctgggggtattttgacttcaacagattccactgccacttctcaccacgtgactggcagcgactcatcaacaacaactggggattccggcctaagcgactcaacttcaagctcttcaacattcaggtcaaagaggttacggacaacaatggagtcaagaccatcgccaataaccttaccagcacggtccaggtcttcacggactcagactatcagctcccgtacgtgctcgggtcggctcacgagggctgcctcccgccgttcccagcggacgttttcatgattcctcagtacgggtatctgacgcttaatgatggaagccaggccgtgggtcgttcgtccttttactgcctggaatatttcccgtcgcaaatgctaagaacgggtaacaacttccagttcagctacgagtttgagaacgtacctttccatagcagctacgctcacagccaaagcctggaccgactaatgaatccactcatcgaccaatacttgtactatctctcaaagactattaacggttctggacagaatcaacaaacgctaaaattcagtgtggccggacccagcaacatggctgtccagggaagaaactacatacctggacccagctaccgacaacaacgtgtctcaaccactgtgactcaaaacaacaacagcgaatttgcttggcctggagcttcttcttgggctctcaatggacgtaatagcttgatgaatcctggacctgctatggccagccacaaagaaggagaggaccgtttctttcctttgtctggatctttaatttttggcaaacaaggagctggaagagacaacgtggatgcggacaaagtcatgataaccaacgaagaagaaattaaaactactaacccggtagcaacggagtcctatggacaagtggccacaaaccaccagagtgcccaagcacaggcgcagaccggctgggttcaaaaccaaggaatacttccgggtatggtttggcaggacagagatgtgtacctgcaaggacccatttgggccaaaattcctcacacggacggcaactttcacccttctccgctgatgggagggtttggaatgaagcacccgcctcctcagatcctcatcaaaaacacacctgtacctgcggatcctccaacggccttcaacaaggacaagctgaactctttcatcacccagtattctactggccaagtcagcgtggagatcgagtgggagctgcagaaggaaaacagcaagcgctggaacccggagatccagtacacttccaactattacaagtctaataatgttgaatttgctgttaatactgaaggtgtatatagtgaaccccgccccattggcaccagatacctgactcgtaatctg

SEQ ID NO: 655 - DNA, 2208 bp, synthetic construct
  misc_difference 377: note = modified_base - a, c, t, or g
  misc_feature 1..2208: note = source = /note="Description of Artificial Sequence: Synthetic polynucleotide"
  source 1..2208: mol_type = other DNA
atggctgccgatggttatcttccagattggctcgaggacaaccttagtgaaggaattcgcgagaggtgggctttgaaacctggagcccctcaacccaaggcaaatcaacaacatcaagacaacgctcgaggtcttgtgcttccgggttacaaataccttggacccggcaacggactcgacaagggggagccggtcaacgcagcagacgcggcggccctcgagcacgacaaggcctacgaccagcagctcaaggccggagacaacccgtacctcaagtacaaccacgccgacgccgagttccaggagcggctcaaagaagatacgtcttttgggggcaacctcgggcgagcagtcttccaggccaaaaagaggcttcntgaacctcttggtctggttgaggaagcggctaagacggctcctggaaagaagaggcctgtagagcagtctcctcaggaaccggactcctccgcgggtattggcaaatcgggtgcacagcccgctaaaaagagactcaatttcggtcagactggcgacacagagtcagtcccagaccctcaaccaatcggagaacctcccgcagccccctcaggtgtgggatctcttacaatggcttcaggtggtggcgcaccagtggcagacaataacgaaggtgccgatggagtgggtagttcctcggggaattggcattgcgattcccaatggctgggggacagagtcatcaccaccagcacccgaacctgggccctgcccacctacaacaatcacctctacaagcaaatctccaacagcacatctggaggatcttcaaatgacaacgcctacttcggctacagcaccccctgggggtattttgacttcaacagattccactgccacttctcaccacgtgactggcagcgactcatcaacaacaactggggattccggcctaagcgactcaacttcaagctcttcaacattcaggtcaaagaggttacggacaacaatggagtcaagaccatcgccaataaccttaccagcacggtccaggtcttcacggactcagactatcagctcccgtacgtgctcgggtcggctcacgagggctgcctcccgccgttcccagcggacgttttcatgattcctcagtacgggtatctgacgcttaatgatggaagccaggccgtgggtcgttcgtccttttactgcctggaatatttcccgtcgcaaatgctaagaacgggtaacaacttccagttcagctacgagtttgagaacgtacctttccatagcagctacgctcacagccaaagcccggaccgactaatgaatccactcatcgaccaatacttgtactatctctcaaagactattaacggttctggacagaatcaacaaacgctaaaattcagtgtggccggacccagcaacatggctgtccagggaagaaactacatacctggacccagctaccgacaacaacgtgtctcaaccactgtgactcaaaacaacaacagcgaatttgcttggcctggagcttcttcttgggctctcaatggacgtaatagcttgatgaatcctggacctgctatggccagccacaaagaaggagaggaccgtttctttcctttgtctggatctttaatttttggcaaacaaggaactggaagagacaacgtggatgcggacaaagtcatgataaccaacgaagaagaaattaaaactactaacccggtagcaacggagtcctatggacaagtggccacaaaccaccagagtgcccaagcacaggcgcagaccggctgggttcaaaaccaaggaatacttccgggtatggtttggcaggacagagatgtgtacctgcaaggacccatttgggccaaaattcctcacacggacggcaactttcacccttctccgctgatgggagggtttggagtgaagcacccgcctcctcagatcctcatcaaaaacacacctgtacctgcggatcctccaacggccttcaacaaggacaagctgaactctttcatcacccagtattctactggccaagtcagcgtggagatcgagtgggagctgcagaaggaaaacagcaagcgctggaacccggagatccagtacacttccaactattacaagtctaataatgttgaatttgctgttaatactgaaggtgtatatagtgaaccccgccccattggcaccagatacctgactcgtaatctg

SEQ ID NO: 656 - DNA, 2208 bp, synthetic construct
  misc_feature 1..2208: note = source = /note="Description of Artificial Sequence: Synthetic polynucleotide"
  source 1..2208: mol_type = other DNA
atggctgccgatggttatcttccagattggctcgaggacaaccttagtgaaggaattcgcgagtggtgggctttgaaacctggagcccctcaacccaaggcaaatcaacaacatcaagacaacgctcgaggtcttgtgcttccgggttacaaataccttggacccggcaacggactcgacaagggggagccggtcaacgcagcagacgcggcggccctcgagcacgacaaggcctacgaccagcagctcaaggccggagacaacccgtacctcaagtacaaccacgccgacgccgagttccaggagcggctcaaagaagatacgtcttttgggggcaacctcgggcgagcagtcttccaggccaaaaagaggcttcttgaacctcttggtctggttgaggaagcggctaagacggctcctggaaagaagaggcctgtagagcagtctcctcaggaaccggactcctccgcgggtattggcaaatcgggtgcacagcccgctaaaaagagactcaatttcggtcagactggcgacacagagtcagtcccagaccctcaaccaatcggagaacctcccgcagccccctcaggtgtgggatctcttacaatggcttcaggtggtggcgcaccagtggcagacaataacgaaggtgccgatggagtgggtagttcctcgggaaattggcattgcgattcccaatggctgggggacagagtcatcaccaccagcacccgaacctgggccctgcccacctacaacaatcacctctacaagcaaatctccaacagcacatctggaggatcttcaaatgacaacgcctacctcggctacagcaccccctgggggtattttgacttcaacagattccactgccacttctcaccacgtgactggcagcgactcatcaacaacaactggggattccggcctaagcgactcaacttcaagctcttcaacattcaggtcaaagaggttacggacaacaatggagtcaagaccatcgccaataaccttaccagcacggtccaggtcttcacggactcagactatcagctcccgtacgtgctcgggtcggctcacgagggctgcctcccgccgttcccagcggacgttttcatgattcctcagtacgggtatctgacgcttaatgatggaagccaggccgtgggtcgttcgtccttttactgcctggaatatttcccgtcgcaaatgctaagaacgggtaacaacttccagttcagctacgagtttgagaacgtacctttccatagcagctacgctcacagccaaagcctggaccgactaatgaatccactcatcgaccaatacttgtactatctctcaaagactattaacggttctggacagaatcaacaaacgctaaaattcagtgtggccggacccagcaacatggctgtccagggaagaaactacatacctggacccagctaccgacaacaacgtgtctcaaccactgtgactcaaaacaacaacagcgaatttgcttggcctggagcttcttcttgggctctcaatggacgtaatagcttgatgaatcctggacctgctatggccagccacaaagaaggagaggaccgtttctttcctttgtctggatctttaatttttggcaaacaaggaactggaagagacaacgtggatgcggacaaagtcatgataaccaacgaagaagaaattaaaactactaacccggtagcaacggagtcctatggacaagtggccacaaaccaccagagtgcccaagcacaggcgcagaccggctgggttcaaaaccaaggaatacttccgggtatggtttggcaggacagagatgtgtacctgcaaggacccatttgggccaaaattcctcacacggacggcaactttcacccttctccgctgatgggagggtttggaatgaagcacccgcctcctcagatcctcatcaaaaacacacctgtacctgcggatcctccaacggccttcaacaaggacaagctgaactctttcatcacccagtattctactggccaagtcagcgtggagatcgagtgggagctgcagaaggaaaacagcaagcgctggaacccggagatccagtacacttccaactattacaagtctaataatgttgaatttgctgttaatactgaaggtgtatatagtgaaccccgccccattggcaccagatacctgactcgtaatctg

SEQ ID NO: 657 - DNA, 2208 bp, synthetic construct
  misc_feature 1..2208: note = source = /note="Description of Artificial Sequence: Synthetic polynucleotide"
  source 1..2208: mol_type = other DNA
atggctgccgatggttatcttccagattggctcgaggacaaccttagtgaaggaattcgcgagtggtgggctttgaaacctggagcccctcaacccaaggcaaatcaacaacatcaagacaacgctcgaggtcttgtgcttccgggttacaaataccttggacccggcaacggactcgacaagggggagccggtcaacgcagcagacgcggcggccctcgagcacgacaaggcctacgaccagcagctcaaggccggagacaacccgtacctcaagtacaaccacgccgacgccgagttccaggagcggctcaaagaagatacgtcttttgggggcaacctcgggcgagcagtcttccaggccaaaaagaggcttcttgaacctcttggtctggttgaggaagcggctaagacggctcctggaaagaagaggcctgtagagcagtctcctcaggaaccggactcctccgcgggtattggcaaatcgggtgcacagcccgctaaaaagagactcaatttcggtcagactggcgacacagagtcagtcccagaccctcaaccaatcggagaacctcccgcagccccctcaggtgtgggatctcttacaatggcttcaggtggtggcgcaccagtggcagacaataacgaaggtgccgatggagtgggtagttcctcgggaaattggcattgcgattcccaatggctgggggacagagtcatcaccaccagcacccgaacctgggccctgcccacctacaacaatcacctctacaagcaaatctccaacagcacatctggaggatcttcaaatgacaacgcctacttcggctacagcaccccctgggggtattttgacttcaacagattccactgccacttctcaccacgtgactggcagcgactcatcaacaacaactggggattccggcctaagcgactcaacttcaagctcttcaacattcaggtcaaagaggttacggacaacaatggagtcaagaccatcgccaataaccttaccagcacggtccaggtcttcacggactcagactatcagctcccgtacgtgctcgggtcggctcacgagggctgcctcccgccgttcccagcggacgttttcatgattcctcagtacgggtatctgacgcttaatgatggaagccaggccgtgggtcgttcgtccttttactgcctggaatatttcccgtcgcaaatgctaagaacgggtaacaacttccagttcagctacgagtttgagaacgtacctttccatagcagctacgctcacagccagagcctggaccgactaatgaatccactcatcgaccaatacttgtactatctctcaaagactattaacggttctggacagaatcaacaaacgctaaaattcagtgtggccggacccagcaacatggctgtccagggaagaaactacatacctggacccagctaccgacaacaacgtgtctcaaccactgtgactcaaaacaacaacagcgaatttgcttggcctggagcttcttcttgggctctcaatggacgtaatagcttgatgaatcctggacctgctatggccagccacaaagaaggagaggaccgtttctttcctttgtctggatctttaatttttggcaaacaaggaactggaagagacaacgtggatgcggacaaagtcatgataaccaacgaagaagaaattaaaactactaacccggtagcaacggagtcctatggacaagtggccacaaaccaccagagtgcccaagcacaggcgcagaccggctgggttcaaaaccaaggaatacttccgggtatggtttggcaggacagagatgtgtacctgcaaggacccatttgggccaaaattcctcacacggacggcaactttcacccttctccgctgatgggagggtttggaatgaagcacccgcctcctcagatcctcatcaaaaacacacctgtacctgcggatcctccaacggccttcaacaaggacaagctggactctttcatcacccagtattctactggccaagtcagcgtggagatcgagtgggagctgcagaaggaaaacagcaagcgctggaacccggtgatccagtacacttccaactattacaagtctaataatgttgaatttgctgttaatactgaaggtgtatatagtgaaccccgccccattggcaccagatacctgactcgtaatctg

SEQ ID NO: 658 - DNA, 2208 bp, synthetic construct
  misc_feature 1..2208: note = source = /note="Description of Artificial Sequence: Synthetic polynucleotide"
  source 1..2208: mol_type = other DNA
atggctgccgatggttatcttccagattggctcgaggacaacctctctgagggcattcgcgagtggtgggacttgaaacctggagccccgaagcccaaagccaaccagcaaaagcaggacgacggccggggtctggtgcttcctggctacaagtacctcggacccttcaacggactcgacaagggggagcccgtcaacgcggcggacgcagcggccctcgagcacgacaaggcctacgaccagcagctcaaagcgggtgacaatccgtacctgcggtataaccacgccgacgccgagtttcaggagcgtctgcaagaagatacgtcttttgggggcaacctcgggcgagcagtcttccaggccaagaagcgggttctcgaacctctcggtctggttgaggaaggcgctaagacggctcctggaaagaaacgtccggtagagcagtcgccacaagagccagactcctcctcgggcatcggcaagacaggccagcagcccgctaaaaagagactcaattttggtcagactggcgactcagagtcagtccccgatccacaacctctcggagaacctccagcaacccccgctgctgtggggcctactacaatggcttcaggcggtggcgcaccaatggcagacaataacgaaggcgtcgacggagtgggtaatgcctcaggaaattggcattgcgattccacatggctgggcgacagagtcatcaccaccagcacccgcacctgggccttgcccacctacaataaccacctctacaagcaaatctccagtgcttcaacgggggccagcaacgacaaccactacttcggctacagcaccccctgggggtattttgatttcaacagattccactgccacttttcaccacgtgactggcagcgactcatcaacaacaattggggattccggcccaagagactcaacttcaaactcttcaacatccaagtcaaggaggtcacgacgaatgatggcgttacaaccatcgctaataaccttaccagcacggttcaagtcttctcggactcggagtaccagcttccgtacgtcctcggctctgcgcaccagggctgcctccctccgttcccggcggacgtgttcatgattccgcaatacggctacctgacgctcaacaatggcagccaagccgtgggacgttcatccttttactgcctggaatatttcccttctcagatgctgagaacgggcaacaactttaccttcagctacacctttgaggaagtgcctttccacagcagctacgcgcacagccagagcctggaccggctgatgaatcctctcatcgaccaatacctgtattacctgaacagaactcaaaatcagtccggaagtgcccaaaacaaggacttgctgtttagccgtgggtctccagctggcatgtctgttcagcccaaaaactggctacctggaccctgttatcggcagcagcgcgtttctaaaacaaaaacagacaacaacaacagcaattttacctggactggtgcttcaaaatataacctcaatgggcgtgaatccatcatcaaccctggcactgctatggcctcacacaaagacgacgaagacaagttctttcccatgagcggtgtcatgatttttggaaaagagagcgccggagcttcaaacactgcattggacaatgtcatgattacagacgaagaggaaattaaagccactaaccctgtggccaccgaaagatttgggaccgtggcagtcaatttccagagcagcagcacagaccctgcgaccggagatgtgcatgctatgggagcattacctggcatggtgtggcaagatagagacgtgtacctgcagggtcccatttgggccaaaattcctcacacagatggacactttcacccgtctcctcttatgggcggctttggactcaagaacccgcctcctcagatcctcatcaaaaacacgcctgttcctgcgaatcctccggcggagttttcagccacaaagcttgcttcattcatcacccaatactccacaggacaagtgagtgtggaaattgaatgggagctgcagaaagaaaacagcaagcgctggaatcccgaagtgcagtacacatccaattatgcaaaatctgccaacgttgattttactgtggacaacaatggactttatactgagcctcgccccattggcacccgttaccttacccgtcccctg

SEQ ID NO: 659 - DNA, 2208 bp, synthetic construct
  misc_feature 1..2208: note = source = /note="Description of Artificial Sequence: Synthetic polynucleotide"
  source 1..2208: mol_type = other DNA
atggctgccgatggttatcttccagattggctcgaggacaacctctctgagggcattcgcgagtggtgggacttgaaacctggagccccgaagcccaaagccaaccagcaaaagcaggacgacggccggggtctggtgcttcctggctacaagtacctcggacccttcaacggactcgacaagggggagcccgtcaacgcggcggacgcagcggccctcgagcacgacaaggcctacgaccagcagctcaaagcgggtgacaatccgtacctgcggtataaccacgccgacgccgagtttcaggagcgtctgcaagaagatacgtcttttgggggcaacctcgggcgagcagtcttccaggccaagaagcgggttctcgaacctctcggtctggttgaggaaggcgctaagacggctcctggaaagagacgtccggtagagcagtcgccacaagagccagactcctcctcgggcatcggcaagacaggccagcagcccgctaaaaagagactcaattttggtcagactggcgactcagagtcagtccccgatccacaacctctcggagaacctccagcaacccccgctgctgtgggacctactacaatggcttcaggcggtggcgcaccaatggcagacaataacgaaggcgccgacggagtgggtaatgcctcaggaaattggcattgcgattccacatggctgggcgacagagtcatcaccaccagcacccgcacctgggccttgcccacctacaataaccacctctacaagcaaatctccagtgcttcaacgggggccagcaacgacaaccactacttcggctacagcaccccctgggggtattttgatttcaacagattccactgccacttttcaccacgtgactggcagcgactcatcaacaacaattggggattccggcccaagagactcaacttcaaactcttcaacatccaagtcaaggaggtcacgacgaatgatggcgtcacaaccatcgctaataaccttaccagcacggttcaagtcttctcggactcggagtaccagcttccgtacgtcctcggctctgcgcaccagggctgcctccctccgttcccggcggacgtgttcatgattccgcaatacggctacctgacgctcaacaatggcagccaagccgtgggacgttcatccttttactgcctggaatatttcccttctcagatgctgagaacgggcaacaactttaccttcagctacacctttgaggaagtgcctttccacagcagctacgcgcacagccagagcctggaccggctgatgaatcctctcatcgaccaatacctgtattacctgaacagaactcaaaatcagtccggaagtgcccaaaacaaggacttgctgtttagccgtgggtctccagctggcatgtctgttcagcccaaaaactggctacctggaccctgttatcggcagcagcgcgtttctaaaacaaaaacagacaacaacaacagcaattttacctggactggtgcttcaaaatataacctcaatgggcgtgaatccatcatcaaccctggcactgctatggcctcacacaaagacgacgaagacaagttctttcccatgagcggtgtcatgatttttggaaaagagagcgccggagcttcaaacactgcattggacaatgtcatgattacagacgaagaggaaattaaagccactaaccctgtggccaccgaaagatttgggaccgtggcagtcaatttccagagcagcagcacagaccctgcgaccggagatgtgcatgctatgggagcattacctggcatggtgtggcaagatagagacgtgtacctgcagggtcccatttgggccaaaattcctcacacagatggacactttcacccgtctcctcttatgggcggctttggactcaagaacccgcctcctcagatcctcatcaaaaacacgcctgttcctgcgaatcctccggcggagttttcagctacaaagtttgcttcgttcatcacccaatactccacaggacaagtgagtgtggaaattgaatgggagctgcagaaagaaaacagcaagcgctggaatcccgaagtgcagtacacatccaattatgcaaaatctgccaacgttgattttactgtggacaacaatggactttatactgagcctcgccccattggcacccgttaccttacccgtcccctg

SEQ ID NO: 660 - DNA, 2208 bp, synthetic construct
  misc_feature 1..2208: note = source = /note="Description of Artificial Sequence: Synthetic polynucleotide"
  source 1..2208: mol_type = other DNA
atggctgccgatggttatcttccagattggctcgaggacaacctctctgagggcattcgcgagtggtgggacttgaaacctggagccccgaagcccaaagccaaccagcaaaagcaggacgacggccggggtctggtgcttcctggctacaagtacctcggacccttcaacggactcgacaagggggagcccgtcaacgcggcggacgcagcggccctcgagcacgacaaggcctacgaccagcagctcaaagcgggtgacaatccgtacccgcggtataaccacgccgacgccgagtttcaggagcgtctgcaagaagatacgtcttttgggggcaacctcgggcgagcagtcttccaggccaagaagcgggttctcgaacctctcggtctggttggggaaggcgctaagacggctcctggaaagaaacgtccggtagagcagtcgccacaagagccagactcctcctcgggcatcggcaagacaggccagcagcccgctaaaaagagactcaattttggtcagactggcgactcagagtcagtccccgatccacaacctctcggagaacctccagcaacccccgctgctgtgggacctactacaatggcttcaggcggtggcgcaccaatggcagacaataacgaaggcgccgacggagtgggtaatgcctcaggaaattggcattgcgattccacatggctgggcgacagagtcatcaccaccagcacccgcacctgggccttgcccacctacaataaccacctctacaagcaaatctccagtgcttcaacgggggccagcaacgacaaccactacttcggctacagcaccccctgggggtattttgatttcaacagattccactgccacttttcaccacgtgactggcagcgactcatcaacaacaattggggattccggcccaagagactcaacttcaaactcttcaacatccaagtcaaggaggtcacgacgaatgatggcgtcacaaccatcgctaataaccttaccagcacggttcaagtcttctcggactcggagtaccagcttccgtacgtcctcggctctgcgcaccagggctgcctccctccgttcccggcggacgtgttcatgattccgcaatacggctacctgacgctcaacaatggcagccaagccgtgggacgttcatccttttactgcctggaatatttcccttctcagatgctgagaacgggcaacaactttaccttcagctacacctttgaggaagtgcctttccacagcagctacgcgcacagccagagcctggaccggctgatgaatcctcccatcgaccaatacctgtattacctgaacagaactcaaaatcagtccggaagtgcccaaaacaaggacttgctgtttagccgtgggtctccagctggcatgtctgttcagcccaaaaactggctacctggaccctgttatcggcagcagcgcgtttctaaaacaaaaacagacaacaacaacagcaattttacctggactggtgcttcaaaatataacctcaatgggcgtgaatccatcatcaaccctggcactgctatggcctcacacaaagacgacgaagacaagttctttcccatgagcggtgtcatgatttttggaaaagagagcgccggagcttcaaacactgcattggacaatgtcatgattacagacgaagaggaaattaaagccactaaccctgtggccaccgaaagatttgggaccgtggcagtcaatttccagagcagcagcacagaccctgcgaccggagatgtgcatgctatgggagcattacctggcatggtgtggcaagatagagacgtgtacctgcagggtcccatttgggccaaaattcctcacacagatggacactttcacccgtctcctcttatgggcggctttggactcaagaacccgcctcctcagatcctcatcaaaaacacgcctgttcctgcgaatcctccggcggagttttcagctacaaagtttgcttcattcatcacccaatactccacaggacaagtgagtgtggaaattgaatgggagctgcagaaagaaaacagcaagcgctggaatcccgaagtgcagtacacatccaattatgcaaaatctgccaacgttgattttactgtggacaacaatggactttatactgagcctcgccccattggcacccgttaccttacccgtcccctg

SEQ ID NO: 661 - DNA, 2208 bp, synthetic construct
  misc_feature 1..2208: note = source = /note="Description of Artificial Sequence: Synthetic polynucleotide"
  source 1..2208: mol_type = other DNA
atggctgccgatggttatcttccagattggctcgaggacaacctctctgagggcattcgcgagtggtgggacttgaaacctggagccccgaagcccaaagccaaccagcaaaagcaggacgacggccggggtctggtgcttcctggctacaagtacctcggacccttcaacggactcgacaagggggagcccgtcaacgcggcggacgcagcggccctcgagcacgacaaggcctacgaccagcagctcaaagcgggtgacaatccgtacctgcggtataaccacgccgacgccgagtttcaggagcgtctgcaagaagatacgtcttttgggggcaacctcgggcgagcagtcttccaggccaagaagcgggttctcgaacctctcggtctggttgaggaaggcgctaagacggctcctggaaagaaacgtccggtagagcagtcgccacaagagccagactcctcctcgggcatcggcaagacaggccagcagcccgctaaaaagagactcaattttggtcagactggcgactcagagtcagtccccgatccacgacctctcggagaacctccagcaacccccgctgctgtgggacctactacaatggcttcaggcggtggcgcaccaatggcagacaataacgaaggcgccgacggagtgggtaatgcctcaggaaattggcattgcgattccacatggctgggcgacagagtcatcaccaccagcacccgcacctgggccttgcccacctacaataaccacctctacaagcaaatctccagtgcttcaacgggggccagcaacgacaaccactacttcggctacagcaccccctgggggtattttgatttcaacagattccactgccacttttcaccacgcgactggcagcgactcatcaacaacaattggggattccggcccaagagactcaacttcaaactcttcaacatccaagtcaaggaggtcacgacgaatgatggcgtcacaaccatcgctaataaccttaccagcacggttcaagtcttctcggactcggagtaccagcttccgtacgtcctcggctctgcgcaccagggctgcctccctccgttcccggcggacgtgttcatgattccgcaatacggctacctgacgctcaacaatggcagccaagccgtgggacgttcatccttttactgcctggaatatttcccttctcagatgctgagaacgggcaacaactttaccttcagctacacctttgaggaagtgcctttccacagcagctacgcgcacagccagagcctggaccggctgatgaatcctctcatcgaccaatacctgtattacctgaacagaactcaaaatcagtccggaagtgcccaaaacaaggacttgctgtttagccgtgggcctccagctggcatgtctgttcagcccaaaaactggctacctggaccctgttatcggcagcagcgcgtttctaaaacaaaaacagacaacaacaacagcaattttacctggactggtgcttcaaaatataacctcaatgggcgtgaatccatcatcaaccctggcactgctatggcctcacacaaagacgacgaagacaagttctttcccatgagcggtgtcatgatttttggaaaagagagcgccggagcttcaaacactgcattggacaatgtcatgattacggacgaagaggaaattaaagccactaaccctgtggccaccgaaagatttgggaccgtggcagtcaatttccagagcagcagcacagaccctgcgaccggagatgtgcatgctatgggagcattacctggcatggtgtggcaagatagagacgtgtacctgcagggtcccatttgggccaaaattcctcacacagatggacactttcacccgtctcctcttatgggcggctttggactcaagaacccgcctcctcagatcctcatcaaaaacacgcctgttcctgcgaatcctccggcggagttttcagctacaaagtttgcttcattcatcacccaatactccacaggacaagtgagtgtggaaattgaatgggagctgcagaaagaaaacagcaagcgctggaatcccgaagtgcagtacacatccaattatgcaaaatctgccaacgttgattttactgtggacaacaatggactttatactgagcctcgccccattggcacccgttaccttacccgtcccctg

SEQ ID NO: 662 - DNA, 2208 bp, synthetic construct
  misc_feature 1..2208: note = source = /note="Description of Artificial Sequence: Synthetic polynucleotide"
  source 1..2208: mol_type = other DNA
atggctgccgatggttatcttccagattggctcgaggacaacctctctgagggcattcgcgagtggtgggacttgaaacctggagccccgaagcccaaagccaaccagcaaaagcaggacgacggccggggtctggtgcttcctggctacaagtacctcggacccttcaacggactcgacaagggggagcccgtcaacgcggcggacgcagcggccctcgagcacgacaaggcctacgaccagcagctcaaagcgggtgacaatccgtacctgcggtataaccacgccgacgccgagtttcaggagcgtctgcaagaagatacgtcttttgggggcaacctcgggcgagcagtcttccaggccaagaagcgggttctcgaacctctcggtctggttgaggaaggcgctaagacggctcctggaaagaaacgtccggtagagcagtcgccacaagagccagactcctcctcgggcatcggcaagacaggccagcagcccgctaaaaagagactcaattttggtcagactggcggctcagagtcagtccccgatccacaacctctcggagaacctccagcaacccccgctgctgtgggacctactacaatggcttcaggcggtggcgcaccaatggcagacaataacgaaggcgccgacggagtgggtaatgcctcaggaaattggcattgcgattccacatggctgggcgacagagtcatcaccaccagcacccgcacctgggccttgcccacctacaataaccacctctacaagcaaatctccagtgcttcaacgggggccagcaacgacaaccactacttcggctacagcaccccctgggggtattttgatttcaacagattccactgccacttttcaccacgtgactggcagcgactcatcaacaacaattggggattccggcccaagagactcaacttcaaactcttcaacatccaagtcaaggaggtcacgacgaatgatggcgtcacaaccatcgctaataaccttaccagcacggttcaagtcttctcggactcggagtaccagcttccgtacgtcctcggctctgcgcaccagggctgcctccctccgttcccggcggacgtgttcatgattccgcaatacggctacctgacgctcaacaatggcagccaagccgtgggacgttcatccttttactgcctggaatatttcccttctcagatgctgagaacgggcaacaactttaccttcagctacacctttgaggaagtgcctttccacagcagctacgcgcacagccagagcctggaccggctgatgaatcctcccatcgaccaatacctgtattacctgaacagaactcaaaatcagtccgggagtgcccaaaacaaggacttgctgtttagccgtgggtctccagctggcatgtctgttcagcccaaaaactggctacctggaccctgttatcggcagcagcgcgtttctaaaacaaaaacagacaacaacaacagcaattttacctggactggtgcttcaaaatataacctcaatgggcgtgaatccatcatcaaccctggcactgctatggcctcacacaaagacgacgaagacaagttctttcccatgagcggtgtcatgatttttggaaaagagagcgccggagcttcaaacactgcattggacaatgtcatgattacagacgaagaggaaattaaagccactaaccctgtggccaccgaaagatttgggaccgtggcagtcaatttccagagcagcagcacagaccctgcgaccggagatgtgcatgctatgggagcattacctggcatggtgtggcaagatagagacgtgtacctgcagggtcccatttgggccaaaattcctcacacagatggacactttcacccgtctcctcttatgggcggctttggactcaagaacccgcctcctcagatcctcatcaaaaacacgcctgttcctgcgaatcctccggcggagttttcagctacaaagtttgcttcattcatcacccaatactccacaggacaagtgagtgtggaaattgaatgggagctgcagaaagaaaacagcaagcgctggaatcccgaagtgcagtacacatccaattatgcaaaatctgccaacgttgactttactgtggacaacaatggactttatactgagcctcgccccattggcacccgttaccttacccgtcccctg

SEQ ID NO: 663 - DNA, 2208 bp, synthetic construct
  misc_feature 1..2208: note = source = /note="Description of Artificial Sequence: Synthetic polynucleotide"
  source 1..2208: mol_type = other DNA
atggctgccgatggttatcttccagattggctcgaggacaacctctctgagggcattcgcgagtggtgggacttgaaacctggagccccgaagcccaaagccaaccagcaaaagcaggacgacggccggggtctggtgcttcctggctacaagtacctcggacccttcaacggactcgacaagggggagcccgtcaacgcggcggacgcagcggccctcgagcacgacaaggcctacgaccagcagctcaaagcgggtgacaatccgtacctgcggtataaccacgccgacgccgagtttcaagagcgtctgcaagaagatacgtcttttgggggcaacctcgggcgagcagtcttccaggccaagaagcgggttctcgaacctctcggtctggttgaggaaggcgctaagacggctcctggaaagaaacgtccggtagagcagtcgccacaagagccagactcctcctcgggcatcggcaagacaggccagcagcccgctaaaaagagactcaattttggtcagactggcgactcagagtcagtccccgatccgcaacctctcggagaacctccagcaacccccgctgctgtgggacctactacaatggcttcaggcggtggcgcaccaatggcagacaataacgaaggcgccgacggagtgggtaatgcctcaggaaattggcattgcgattccacatggctgggcgacagagtcatcaccaccagcacccgcacctgggccttgcccacctacaataaccacctctacaagcaaatctccagtgcttcaacgggggccagcaacgacaaccactacttcggctacagcaccccctgggggtattttgatttcaacagattccactgccacttttcaccacgtgactggcagcgactcatcaacaacaattggggattccggcccaagagactcaacttcaaactcttcaacatccaagtcaaggaggtcacgacgaatgatggcgtcacaaccatcgctaataaccttaccagcacggttcaagtcttctcggactcggagtaccagcttccgtacgtcctcggctctgcgcaccagggctgcctccctccgttcccggcggacgtgttcatgattccgcaatacggctacctgacgctcaacaatggcagccaagccgtgggacgttcatccttttactgcctggaatatttcccttctcagatgctgagaacgggcaacaactttaccttcagctacacctttgaggaagtgcctttccacagcagctacgcgcacagccagagcctggaccggctgatgaatcctctcatcgaccaatacctgtattacctgaacagaactcaaaatcagtccggaagtgcccaaaacaaggacttgctgtttagccgtgggtctccagctggcatgtctgttcagcccaaaaactggctacctggaccctgttatcggcagcagcgcgtttctaaaacaaaaacagacaacaacaacagcaattttacctggactggtgcttcaaaatataacctcaatgggcgtgaatccatcatcaaccctggcactgctgtggcctcacacaaagacgacgaagacaagttctttcccatgagcggtgtcatgatttttggaaaagagagcgccggagcttcaaacactgcattggacaatgtcatgattacagacgaagaggaaattaaagccactaaccctgtggccaccgaaagatttgggaccgtggcagtcaatttccagagcagcagcacagaccctgcgaccggagatgtgcatgctatgggagcattacctggcatggtgtggcaagatagagacgtgtacctgcagggtcccatttgggccaaaattcctcacacagatggacactttcacccgtctcctcttatgggcggctttggactcaagaacccgcctcctcagatcctcatcaaaaacacgcctgttcctgcgaatcctccggcggagttttcagctacaaagtttgcttcattcatcacccaatactccacaggacaagtgagtgtggaaattgaatgggagctgcagaaagaaaacagcaagcgctggaatcccgaagtgcagtacacatccaattatgcaaaatctgccaacgttgattttactgtggacaacaatggactttatactgagcctcgccccattggcacccgttaccttacccgtcccctg

SEQ ID NO: 664 - DNA, 2208 bp, synthetic construct
  misc_feature 1..2208: note = source = /note="Description of Artificial Sequence: Synthetic polynucleotide"
  source 1..2208: mol_type = other DNA
atggctgccgatggttatcttccagattggctcgaggacaacctctctgagggcattcgcgagtggtgggacttgaaacctggagccccgaagcccaaagccaaccagcaaaagcaggacgacggccggggtctggtgcttcctggctacaagtacctcggacccttcaacggactcgacaagggggagcccgtcaacgcggcggacgcagcggccctcgagcacgacaaggcctacgaccagcagctcaaagcgggtgacaatccgtacctgcggtataaccacgccgacgccgagtttcaggagcgtctgcaagaagatacgtcttttgggggcaacctcgggcgagcagtcttccaggccaagaagcgggttctcgaacctctcggtctggttgaggaaggcgctaagacggctcctggaaagaaacgtccggtagagcagtcgccacaagagccagactcctcctcgggcatcggcaagacaggccagcagcccgctaaaaagagactcaattttggtcagactggcgactcagagtcagtccccgatccacaacctctcggagaacctccagcaacccccgctgctgtgggacctactacaatggcttcaggcggtggcgcaccaatggcagacaataacgaaggcgccgacggagtgggtaatgcctcaggaaattggcattgcgattccacatggctgggcgacagagtcatcaccaccagcacccgcacctgggccttgcccacctacaataaccacctctacaagcaaatctccagtgcttcaacgggggccagcaacgacaaccactacttcggctacagcaccccctgggggtattttgatttcaacagattccactgccacttttcaccacgtgactggcagcaactcatcaacaacaattggggattccggcccaagagactcaacttcaaactcttcaacatccaagtcaaggaggtcacgacgaatgatggcgtcacaaccatcgctaataaccttaccagcacggttcaagtcttctcggactcggagtaccagcttccgtacgtcctcggctctgcgcaccagggctgcctccctccgttcccggcggacgtgttcatgattccgcaatacggctacctgacgctcaacaatggcagccaagccgtgggacgttcatccttttactgcctggaatatttcccttctcagatgctgagaacgggcaacaactttaccttcagctacacctttgaggaagtgcctttccacagcagctacgcgcacagccagagcctggaccggctgatgaatcctctcatcgaccaatacctgtattacctgaacagaactcaaaatcagtccggaagtgcccaaaacaaggacttgctgtttagccgtgggtctccagctggcatgtctgttcagcccaaaaactggctacctggaccctgttatcggcagcagcgcgtttctaaaacaaaaacagacaacaacaacagcaattttacctggactggtgcttcaaaatataacctcaatgggcgtgaatccatcatcaaccctggcactgctatggcctcacacaaagacgacgaagacaagttctttcccatgagcggtgtcatgatttttggaaaagagagcgccggagcttcaaacactgcattggacaatgtcatgattacagacgaagaggaaattaaagccactaaccctgtggccaccgaaagatttgggaccgtggcagtcaatttccagagcaccagcacagaccctgcgaccggagatgtgcatgctatgggagcattacctggcatggtgtggcaagatagagacgtgtacctgcagggtcccatttgggccaaaattcctcacacagatggacactttcacccgtctcctcttatgggcggctttggactcaagaacccgcctcctcagatcctcatcaaaaacacgcctgttcctgcgaatcctccggcggagttttcagctacaaagtttgcttcattcatcacccaatactccacaggacaagtgagtgtggaaattgaatgggagctgcagaaagaaaacagcaagcgctggaatcccgaagtgcagtacacatccaattatgcaaaatctgccgacgttgattttactgtggacaacaatggactttatactgagcctcgccccattggcacccgttaccttacccgtcccctg

SEQ ID NO: 665 - DNA, 2208 bp, synthetic construct
  misc_feature 1..2208: note = source = /note="Description of Artificial Sequence: Synthetic polynucleotide"
  source 1..2208: mol_type = other DNA
atggctgccgatggttatcttccagattggctcgaggacaacctctctgagggcattcgcgagtggtgggacttgaaacctggagccccgaagcccaaagccaaccagcaaaagcaggacgacggccggggtctggtgcttcctggctacaagtacctcggacccttcaacggactcgacaagggggagcccgtcaacgcggcggacgcagcggccctcgagcacgacaaggcctacgaccagcagctcaaagcgggtgacaatccgtacctgcggtataaccacgccgacgccgagtttcaagagcgtctgcaagaagatacgtcttttgggggcaacctcgggcgagcagtcttccaggccaagaagcgggttctcgaacctctcggtctggttgaggaaggcgctaagacggctcctggaaagaaacgtccggtagagcagtcgccacaagagccagactcctcctcgggcatcggcaagacaggccagcagcccgctaaaaagagactcaattttggtcagactggcgactcagagtcagtccccgatccgcaacctctcggagaacctccagcaacccccgctgctgtgggacctactacaatggcttcaggcggtggcgcaccaatggcagacaataacgaaggcgccgacggagtgggtaatgcctcaggaaattggcattgcgattccacatggctgggcgacagagtcatcaccaccagcacccgcacctgggccttgcccacctacaataaccacctctacaagcaaatctccagtgcttcaacgggggccagcaacgacaaccactacttcggctacagcaccccctgggggtattttgatttcaacagattccactgccacttttcaccacgtgactggcagcgactcatcaacaacaattggggattccggcccaagagactcaacttcaaactcttcaacatccaagtcaaggaggtcacgacgaatgatggcgtcacaaccatcgctaataaccttaccagcacggttcaagtcttctcggactcggagtaccagcctccgtacgtcctcggctctgcgcaccagggctgcctccctccgttcccggcggacgtgttcatgattccgcaatacggccacctgacgctcaacaatggcagccaagccgtgggacgttcatccttttactgcctggaatatttcccttctcagatgctgagaacgggcaacaactttaccttcagctacacctttgaggaagtgcctttccacagcagctacgcgcacagccagagcctggaccggctgacgaatcctctcatcgaccaatacctgtattacctgaacagaactcaaaatcagtccggaagtgcccaaaacaaggacttgctgtttagccgtgggtctccagctggcatgtctgttcagcccaaaaactggctacctggaccctgttatcggcagcagcgcgtttctaaaacaaaaacagacaacaacaacagcaattttacctggactggtgcttcaaaatataacctcaatgggcgtgaatccatcatcaaccctggcactgctatggcctcacacaaagacgacgaagacaagttctttcccatgagcggtgtcatgatttttggaaaagagagcgccggagcttcaaacactgcattggacaatgtcatgattacagacgaagaggaaattaaagccactaaccctgtggccaccgaaagatttgggaccgtggcagtcaatttccagagcagcagcacagaccctgcgaccggagatgtgcatgctatgggagcattacctggcatggtgtggcaagatagagacgtgtacctgcagggtcccatttgggccaaaattcctcacacagatggacactttcacccgtctcctcttatgggcggctttggactcaagaacccgcctcctcagatcctcatcaaaaacacgcctgttcctgcgaatcctccggcggagttttcagctacaaagtttgcttcattcatcacccaatactccacaggacaagtgagtgtggaaattgaatgggagctgcagaaagaaaacagcaagcgctggaatcccgaagtgcagtacacatccaattatgcaaaatctgccaacgttgattttactgtggacaacaatggactttatactgagcctcgccccattggcacccgttaccttacccgtcccctg

SEQ ID NO: 666 - DNA, 2208 bp, synthetic construct
  misc_feature 1..2208: note = source = /note="Description of Artificial Sequence: Synthetic polynucleotide"
  source 1..2208: mol_type = other DNA
atggctgccgatggttatcttccagattggctcgaggacaacctctctgagggcattcgcgagtggtgggacttgaaacctggagccccgaagcccaaagccaaccagcaagagcaggacgacggccggggtctggtgcttcctggctacaagtacctcggacccttcaacggactcgacaagggggagcccgtcaacgcggcggacgcagcggccctcgagcacgacaaggcctacgaccagcagctcaaagcgggtgacaatccgtacctgcggtataaccacgccgacgccgagtttcaggagcgtctgcaagaagatacgtcttttgggggcaacctcgggcgagcagtcttccaggccaagaagcgggttctcgaacctctcggtctggttgaggaaggcgctaagacggctcctggaaagaaacgtccggtagagcagtcgccacaagagccagactcctcctcgggcatcggcaagacaggccagcagcccgctaaaaagagactcaattttggtcagactggcgactcagagtcagtccccgatccacaacctctcggagaacctccagcaacccccgctgctgtgggacctactacaatggcttcaggcggtggcgcaccaatggcagacaataacgaaggcgccgacggagtgggtaatgcctcaggaaattggcattgcgattccacatggctgggcgacagagtcatcaccaccagcacccgcacctgggccttgcccacctacaataaccacctctacaagcaaatctccagtgcttcaacgggggccagcaacgacaaccactacttcggctacagcaccccctgggggtattttgatttcaacagattccactgccacttttcaccacgtgactggcagcgactcatcaacaacaattggggattccggcccaagagactcaacttcaaactcttcaacatccaagtcaaggaggtcacgacgaatgatggcgtcacaaccatcgctaataaccttaccagcacggttcaagtcttctcggactcggagtaccagcttccgtacgtcctcggctctgcgcaccagggctgcctccctccgttcccggcggacgtgttcatgattccgcaatacggctacctgacgctcaacaatggcagccaagccgtgggacgttcatccttttactgcctggaatatttcccttctcagatgctgagaacgggcaacaactttaccttcagctacacctttgaggaagtgcctttccacagcagctacgcgcacagccagagcctggaccggctgatgaatcctctcatcgaccaatacctgtattacctgaacagaactcaaaatcagtccggaagtgcccaaaacaaggacttgctgtttagccgtgggtctccagctggcatgtctgttcagcccaaaaactggctacctggaccctgttatcggcagcagcgcgtttctaaaacaaaaacagacaacaacaacagcaattttacctggactggtgcttcaaaatataacctcaatgggcgtgaatccatcatcaaccctggcactgctatggcctcacacaaagacgacgaagacaagttctttcccatgagcggtgtcatgatttttggaaaagagagcgccggagcttcaaacactgcattggacaatgtcatgattacagacgaagaggaaattaaagccactaaccctgtggccaccgaaagatttgggaccgtggcagtcaatttccagagcagcagcacagaccctgcgaccggagatgtgcatgctacgggaacattacctggcatggtgtggcaagatagagacgtgtacctgcagggtcccatttgggccaaaattcctcacacagatggacactttcacccgtctcctcttatgggcggctttggactcaagaacccgcctcctcagatcctcatcaaaaccacgcctgttcctgcgaatcctccggcggagttttcagctacaaagtttgcttcattcatcacccagtactccacaggacaagtgagtgtggaaattgaatgggagctgcagaaagaaaacagcaagcgctggaatcccgaagtgcagtacacatccaattatgcaaaatctgccaacgttgattttactgtggacgacaatggactttatactgagcctcgccccattggcacccgttaccttacccgtcccctg

SEQ ID NO: 667 - DNA, 2208 bp, synthetic construct
  misc_feature 1..2208: note = source = /note="Description of Artificial Sequence: Synthetic polynucleotide"
  source 1..2208: mol_type = other DNA
atggctgccgatggttatcttccagattggctcgaggacaacctctctgagggcattcgcgagtggtgggacttgaaacctggagccccgaagcccaaagccaaccagcaaaagcaggacgacggccggggtctggtgcttcctggctacaagtacctcggacccttcaacggactcgacaagggggagcccgtcaacgcggcggacgcagcggccctcgagcacgacaaggcctacgaccagcagctcaaagcgggtgacaatccgtacctgcggtataaccacgccgacgccgagtttcaggagcgtctgcaagaagatacgtcttttgggggcaacctcgggcgagcagtcttccaggccaagaagcgggttctcgaacctctcggtctggttgaggaaggcgctaagacggctcctggaaagaaacgtccggtagagcagtcgctacaagagccagactcctcctcgggcatcggcaagacaggccagcagcccgctaaaaagagactcaattttggtcagactggcgactcagagtcagtccccgatccacaacctctcggagaacctccagcaacccccgctgctgtgggacctactacaatggcttcaggcggtggcgcaccaatggcagacaataacgaaggcgccgacggagtgggtaatgcctcaggaaattggcattgcgattccacatggctgggcgacagagtcatcaccaccagcacccgcacctgggccttgcccacctacaataaccacctctacaagcaaatctccagtgcttcaacgggggccagcaacgacaaccactacttcggctacagcaccccctgggggtattttgatttcaacagattccactgccacttttcaccacgtgactggcagcgactcatcaacaacaattggggattccggcccaagagactcaacttcaaactcttcaacatccaagtcaaggaggtcacgacgaatgatggcgtcacaaccatcgctaataaccttaccagcacggttcaagtcttctcggactcggagtaccagcttccgtacgtcctcggctctgcgcaccagggctgcctccctccgttcccggcggacgtgttcatgattccgcaatacggctacctgacgctcaacaatggcagccaagccgtgggacgttcatccttttactgcctggaatatttcccttctcagatgctgagaacgggcaacaactttaccttcagctacacctttgaggaagtgcctttccacagcagctacgcgcacagccagagcctggaccggctgatgaatcctctcatcgaccaatacctgtattacctgaacagaactcaaaatcagtccggaagtgcccaaaacaaggacttgctgtttagccgtgggtctccagctggcatgtctgttcagcccaaaaactggctacctggaccctgttatcggcagcagcgcgtttctaaaacaaaaacagacaacgacaacagcaattttacctggactggtgcttcaaaatataacctcaatgggcgtgaatccatcatcaaccctggcactgctatggcctcacacaaagacgacgaagacaagttctttcccatgagcggtgtcatgatttttggaaaagagagcgccggagcttcaaacactgcattggacaatgtcatgattacagacgaagaggaaattaaagccactaaccctgtggccaccgaaagatttgggaccgtggcagtcaatttccagagcagcagcacagaccctgcgaccggagatgtgcatgctatgggagcattacctggcatggtgtggcaagatagagacgtgtacctgcagggtcccatttgggccaaaattcctcacacagatggacactttcacccgtctcctcttatgggcggctttggactcaagaacccgcctcctcagatcctcatcaaaaacacgcctgttcctgcgaatcctccggcggagttttcagctacaaagtttgcttcattcatcacccaatactccacaggacaagtgagtgtggaaattgaatgggagctgcagaaagaaaacagcaagcgctggaatcccgaagtgcagtacacatccaattatgcaaaatctgccaacgttgattttactgtggacaacaatggactttatactgagcctcgccccattggcacccgttaccttacccgtcccctg

SEQ ID NO: 668 - DNA, 2208 bp, synthetic construct
  misc_feature 1..2208: note = source = /note="Description of Artificial Sequence: Synthetic polynucleotide"
  source 1..2208: mol_type = other DNA
atggctgccgatggttatcttccagattggctcgaggacaacctctctgagggcattcgcgagtggtgggacttgaaacctggagctccgaagcccaaagccaaccagcaaaagcaggacgacggccggggtctggtgcttcctggctacaagtacctcggacccttcaacggactcgacaagggggagcccgtcaacgcggcggacgcagcggccctcgagcacgacaaggcctacgaccagcagctcaaagcgggtgacaatccgtacctgcggtataaccacgccgacgccgagtttcaggagcgtctgcaagaagatacgtcttttgggggcaacctcgggcgagcagtcttccaggccaagaagcgggttctcgaacctctcggtctggttgaggaaggcgctaagacggctcctggaaagaaacgtccggtagagcagtcgccacaagagccagactcctcctcgggcatcggcaagacaggccagcagcccgctaaaaagagactcaattttggtcagactggcgactcagagtcagtccccgatccacaacctctcggagaacctccagcaacccccgctgctgtgggacctactacaatggcttcaggcggtggcgcaccaatggcagacaataacgaaggcgccgacggagtgggtaatgcctcaggaaattggcattgcgattccacatggctgggcgacagagtcatcaccaccagcacccgcacctgggccttgcccacctacaataaccacctctacaagcaaatctccagtgcttcaacgggggccagcaacgacaaccactacttcggctacagcaccccctgggggtattttgatttcaacagattccactgccacttttcaccacgtgactggcagcgactcatcaacaacaattggggattccggcccaagagactcaacttcaaactcttcaacatccaagtcaaggaggtcacgacgaatgatggcgtcacaaccatcgctaataaccttaccagcacggttcaagtcttctcggactcggagtaccagcttccgtacgtcctcggctctgcgcaccagggctgcctccctccgttcccggcggacgtgttcatgattccgcaatacggctacctgacgctcaacaatggcagccaagccgtgggacgttcatccttttactgcctggaatatttcccttctcagatgctgagaacgggcaacaactttaccttcagctacacctttgaggaagcgcctttccacagcagctacgcgcacagccagagcctggaccggctgatgaatcctctcatcgaccaatacctgtattacctgaacagaactcaaaatcagtccggaagtgcccaaaacaaggacttgctgtttagccgtgggtctccagctggcatgtctgttcagcccaaaaactggctacctggaccctgttatcggcagcagcgcgtttctaaaacaaaaacagacaacaacaacagcaattttacctggactggtgcttcaaaatataacctcaatgggcgtgaatccatcatcaaccctggcactgctatggcctcacacaaagacgacgaagacaagttctttcccatgagcggtgtcatgatttttggaaaagagagcgccggagcttcaaacactgcattggacaatgtcatgattacagacgaagaggaaattaaagccactaaccctgtggccaccgaaagatttgggaccgtggcagtcaatttccagagcagcagcacagaccctgcgaccggagatgtgcatgctatgggagcattacctggcatggtgtggcaagatagagacgtgtacctgcagggtcccatttgggccaaaattcctcacacagatggacactttcacccgtctcctcttatgggcggctttggactcaagaacccgcctcctcagatcctcatcaaaaacacgcctgttcctgcgaatcctccggcggagttttcagctacaaagtttgcttcattcatcacccaatactccacaggacaagtgagtgtggaaattgaatgggagctgcagaaagaaaacagcaagcgctggaatcccgaagtgcagtacacatccaattatgcgaaatctgccaacgttgattttactgtggacaacaatggactttatactgagcctcgccccgttggcacccgttaccttacccgtcccctg

SEQ ID NO: 669 - DNA, 2208 bp, synthetic construct
  misc_feature 1..2208: note = source = /note="Description of Artificial Sequence: Synthetic polynucleotide"
  source 1..2208: mol_type = other DNA
atggctgccgatggttatcttccagattggctcgaggacaacctctctgagggcattcgcgagtggtgggacttgaaacctggagccccgaagcccaaagccaaccagcaaaagcaggacgacggccggggtctggtgcttcctggctacaagtacctcggacccttcaacggactcgacaagggggagcccgtcaacgcggcggacgcagcggccctcgagcacgacaaggcctacgaccagcagctcaaagcgggtgacaatccatacctgcggtataaccacgccgacgccgagtttcaggagcgtctgcaagaaaatacgtcttttgggggcaacctcgggcgagcagtcttccaggccaagaagcgggttctcgaacctctcggtctggttgaggaaggcgctaagacggctcctggaaagaaacgtccggtagagcagtcgccacaagagccagactcctcctcgggcatcggcaagacaggccagcagcccgctaaaaagagactcaattttggtcagactggcgactcagagtcagtccccgatccacaacctctcggagaacctccagcaacccccgctgctgtgggacctactacaatggcttcaggcggtggcgcaccaatggcagacaataacgaaggcgccgacggagtgggtaatgcctcaggaaattggcattgcgattccacatggctgggcgacagagtcatcaccaccagcacccgcacctgggccttgcccacctacaataaccacctctacaagcaaatctccagtgcttcaacgggggccagcaacgacaaccactacttcggctacagcaccccctgggggtattttgatttcaacagattccactgccactttccaccacgtgactggcagcgactcatcaacaacaattggggattccggcccaagagactcaacttcaaactcttcaacatccaagtcaaggaggtcacgtcgaatgatggcgtcacaaccatcgctaataaccttaccagcacggttcaagtcttctcggactcggagtaccagcttccgtacgtcctcggctctgcgcaccagggctgcctccctccgttcccggcggacgtgttcatgattccgcaatacggctacctgacgctcaacaatggcagccaagccgtgggacgttcatccttttactgcctggaatatttcccttctcagatgctgagaacgggcaacaactttaccttcagctacacctttgaggaagtgcctttccacagcagctacgcgcacagccagagcctggaccggctgatgaatcctctcatcgaccaatacctgtattacctgaacagaactcaaaatcagtccggaagtgcccaaaacaaggacttgctgtttagccgtgggtctccagctggcatgtctgttcagcccaaaaactggctacctggtccctgttatcggcagcagcgcgtttctaaaacaaaaacagacaacaacaacagcaattttacctggactggtgcttcaaaatataacctcaatgggcgtgaatccatcatcaaccctggcactgctatggcctcacacaaagacgacgaagacaagttctttcccatgagcggtgtcatgatttttggaaaagagagcgccggagcttcaaacactgcattggacaatgtcatgattacagacgaagaggaaattaaagccactaaccctgtggccaccgaaagatttgggaccgtggcagtcaatttccagagcagcagcacagaccctgcgaccggagatgtgcatgctatgggagcattacctggcatggtgtggcaagatagagacgtgtacctgcagggtcccatttgggccaaaattcctcacacagatggacactttcacccgtctcctcttatgggcggctttggactcaagaacccgcctcctcagatcctcatcaaaaacacgcctgttcctgcgaatcctccggcggagttttcagctacaaagtttgcttcattcatcacccaatactccacaggacaagtgagtgtggaaattgaatgggagctgcagaaagaaaacagcaagcgctggaatcccgaagtgcagtacacatccaattatgcaaaatctgccaacgttgattttactgtggacaacaatggactttatactgagcctcgccccattggcacccgttaccttacccgtcccctg

SEQ ID NO: 670 - DNA, 2208 bp, synthetic construct
  misc_feature 1..2208: note = source = /note="Description of Artificial Sequence: Synthetic polynucleotide"
  source 1..2208: mol_type = other DNA
atggctgccgatggttatcttccagattggctcgaggacaacctctctgagggcattcgcgagtggtgggacttgaaacctggagccccgaagcccaaagccaaccagcaaaagcaggacgacggccggggtctggtgcttcctggctacaagtacctcggacccttcaacggactcgacaagggggagcccgtcaacgcggcggacgcagcggccctcgagcacgacaaggcctacgaccagcagctcaaagcgggtgacaatccgtacctgcggtataaccacgccgacgccgagtttcaggagcgtctgcaagaagatacgtcttttgggggcaacctcgggcgagcagtcttccaggccaagaagcgggttctcgaacctctcggtctggttgaggaaggcgctaagacggctcctggaaagaaacgtccggtagagcagtcgccacaagagccagactcctcctcgggcatcggcaagacaggccagcagcccgctaaaaagagactcaattttggtcagactggcgactcagagtcagtccccgatccacaacctctcggagaacctccagcaacccccgctgctgtgggacctactacaatggcttcaggcggtggcgcaccaatggcagacaataacgaaggcgccgacggagtgggtaatgcctcaggaaattggcattgcgattccacatggctgggcgacagagtcatcaccaccagcacccgcacctgggccttgcccacctacaataaccacctctacaagcaaatctccagtgcttcaacgggggccagcaacgacaaccactacttcggctacagcaccccctgggggtattttgatttcaacagattccactgccacttttcaccacgtgactggcagcgactcatcaacaacaattggggattccggcccaagagactcaacttcaaactcttcaacatccaagtcaaggaggtcacgacgaatgatggcgtcacaaccatcgctaataaccttaccagcacggttcaagtcttctcggactcggagtaccagcttccgtacgtcctcggctctgcgcaccagggctgcctccctccgttcccggcggacgtgttcatgattccgcaatacggctacctgacgctcaacaatggcagccaagccgtgggacgttcatccttttactgcctggaatatttcccttctcagatgctgagaacgggcaacaactttaccttcagctacacctttgaggaagtgcctttccacagcagctacgcgcacagccagagcctggaccggctgatgaatcctctcatcgaccaatacctgtattacctgaacagaactcaaaatcagtccggaagtgcccaaaacaaggacttgctgtttagccgtgggtctccagctggcacgtctgttcagcccaaaaactggctacctggaccctgttatcggcagcagcgcgtttctaaaacaaaaacagacaacaacaacagcaattttacctggactggtgcttcaaaatataacctcaatgggcgtgaatccatcatcaaccctggcactgctatggcctcacacaaagacgacgaagacaagttctttcccatgagcggtgtcatgatttttggaaaagagagcgccggagcttcaaacactgcattggacaatgtcatgattacagacgaagaggaaattaaagccactaaccctgtggccaccgaaagatttgggaccgtggcagtcaatttccagagcagcagcacagaccctgcgaccggagatgtgcatgctatgggagcattacctggcatggtgtggcaagatagagacgtgtacctgcagggtcccatttgggccaaaattcctcacacagatggacactttcacccgtctcctcttatgggcggctttggactcaagaacccgcctcctcagatcctcatcaaaaacacgcctgttcctgcgaatcctccggcggagttttcagctacaaagtttgcttcattcatcacccaatactccacaggacaagtgagtgtggaaattgaatgggagctgcagaaagaaaacagcaagcgctggaatcccgaagtgcagtacacatccaattatgcaaaatctgccaacgttgattttactgtggacaacaatggactttatactgggcctcgccccattggcacccgttaccttacccgtcccctg

SEQ ID NO: 671 - DNA, 2208 bp, synthetic construct
  misc_feature 1..2208: note = source = /note="Description of Artificial Sequence: Synthetic polynucleotide"
  source 1..2208: mol_type = other DNA
atggctgccgatggttatcttccagattggctcgaggacaacctctctgagggcattcgcgagtggtgggacttgaaacctggagccccgaagcccaaagccaaccagcaaaagcaggacgacggccggggtctggtgcttcctggctacaagtacctcggacccttcaacggactcgacaagggggagcccgtcaacgcggcggacgcagcggccctcgagcacgacaaggcctacgaccagcagctcaaagcgggtgacaatccgtacctgcggtataaccacgccgacgccgagtttcaggagcgtctgcaagaagatacgtcttttgggggcaacctcgggcgagcagtcttccaggccaagaagcgggttctcgaacctctcggtctggttgaggaaggcgctaagacggctcctggaaagaaacgtccggtagagcagtcgccacaagagccagactcctcctcgggcatcggcaagacaggccagcagcccgctaaaaagagactcaattttggtcagactggcgactcagagtcagtccccgatccacaacctctcggagaacctccagcaacccccgctgctgtgggacctactacaatggcttcaggcggtggcgcaccaatggcagacaataacgaaggcgccgacggagtgggtaatgccccaggaaattggcattgcgactccacatggctgggcgacagagtcatcaccaccagcacccgcacctgggccttgcccacctacaataaccacctctacaagcaaatctccagtgcttcaacgggggccagcaacgacaaccactacttcggctacagcaccccctgggggtattttgatttcaacagattccactgccacttttcaccacgtgactggcagcgactcatcaacaacaattggggattccggcccaagagactcaacttcaaactcttcaacatccaagtcaaggaggtcacgacgaatgatggcgtcacaaccatcgctaataaccttaccagcacggttcaagtcttctcggactcggagtaccagcttccgtacgtcctcggctctgcgcaccagggctgcctccctccgttcccggcggacgtgttcatgattccgcaatacggctacctgacgctcaacaatggcagccaagccgtgggacgttcatccttttactgcctggaatatttcccttctcagatgctgagaacgggcaacaactttaccttcagctacacctttgaggaagtgcctttccacagcagctacgcgcacagccagagcctggaccggctgatgaatcctctcatcgaccaatacctgtattacctgaacagaactcaaaatcagtccggaagtgcccaaaacaaggacttgctgtttagccgtgggtctccagctggcatgtctgttcagcccaaaaactggctacctggaccctgttatcggcagcagcgcgtttctaaaacaaaaacagacaacaacaacagcaattttacctggactggtgcttcaaaatataacctcaatgggcgtgaatccatcatcaaccctggcacagctatggcctcacacaaagacgacgaagacaagttctttcccatgagcggtgtcatgatttttggaaaagagagcgccggagcttcaaacactgcattggacaatgtcatgattacaggcgaagaggaaattaaagccactaaccctgtggccaccgaaagatttgggaccgtggcagtcaatttccagagcagcagcacagaccctgcgaccggagatgtgcatgctatgggagcattacctggcatggtgtggcaagatagagacgtgtacctgcagggtcccatttgggccaaaattcctcacacagatggacactttcacccgtctcctcttatgggcggctttggactcaagaacccgcctcctcagatcctcatcaaaaacacgcctgttcctgcgaatcctccggcggagttttcagctacaaagtttgcttcattcatcacccaatactccacaggacaagtgagtgtggaaattgaatgggagctgcagaaagaaaacagcaagcgctggaatcccgaagtgcagtacacatccaattatgcaaaatctgccaacgttgattttactgtggacaacaatggactttatactgagcctcgccccattggcacccgttaccttacccgtcccctg

SEQ ID NO: 672 - DNA, 2208 bp, synthetic construct
  misc_feature 1..2208: note = source = /note="Description of Artificial Sequence: Synthetic polynucleotide"
  source 1..2208: mol_type = other DNA
atggctgccgatggttatcttccagattggctcgaggacaacctctctgagggcattcgcgagtggtgggacttgaaacctggagccccgaagcccaaagccaaccagcaaaagcaggacgacggccggggtctggtgcttcctggctacaagtacctcggacccttcaacagactcgacaagggggagcccgtcaacgcggcggacgcagcggccctcgagcacgacaaggcctacgaccagcagctcaaagcgggtgacaatccgtacctgcggtataaccacgccgacgccgagtttcaggagcgtctgcaagaagatacgtcttttgggggcaacctcgggcgagcagtcttccaggccaagaagcgggttctcgaacctctcggtctggttgaggaaggcgctaagacggctcctggaaggaaacgtccggtagagcagtcgccacaagagccagactcctcctcgggcatcggcaagacaggccagcagcccgctaaaaagagactcaattttggtcagactggcgactcagagtcagtccccgatccacaacctctcggagaacctccagcaacccccgctgctgtgggacctactacaatggcttcaggcggtggcgcgccaatggcagacaataacgaaggcgccgacggagtgggtaatgcctcaggaaattggcattgcgattccacatggctgggcgacagagtcatcaccaccagcacccgcacctgggccttgcccacctacaataaccacctctacaagcaaatctccagtgcttcaacgggggccagcaacgacaaccactacttcggctacagcaccccctgggggtattttgatttcaacagattccactgccacttttcaccacgtgactggcagcgactcatcaacaacaattggggattccggcccaagagactcaacttcaaactcttcaacatccaagtcaaggaggtcacgacgaatgatggcgtcacaaccatcgctaataaccttaccagcacggttcaagtcttctcggactcggagtaccagcttccgtacgtcctcggctctgcgcaccagggctgcctccctccgttcccggcggacgtgttcatgattccgcaatacggctacctgacgctcaacaatggcggccaagccgtgggacgttcatccttttactgcctggaatatttcccttctcagatgctgagaacgggcaacaactttaccttcagctacacctttgaggaagtgcctttccacagcagctacgcgcacagccagagcctggaccggctgatgaatcctctcatcgaccaatacctgtattacctgaacagaactcaaaatcagtccggaagtgcccaaaacaaggacttgctgtttagccgtgggtctccagctggcatgtctgttcagcccaaaaactggctacctggaccctgttatcggcagcagcgcgtttctaaaacaaaaacagacaacaacaacagcaattttacctggactggtgcttcaaaatatagcctcaatgggcgtgaatccatcatcaaccctggcactgctatggcctcacacaaagacgacgaagacaagttctttcccatgggcggtgtcatgatttttggaaaagagagcgccggagcttcaaacactgcattggacaatgccatgattacagacgaagaggaaattaaagccactaaccctgtggccaccgaaagatttgggaccgtggcagtcaatttccagagcagcagcacagaccctgcgaccggagatgtgcatgctatgggagcattacctggcatggtgtggcaagatagagacgtgtacctgcagggtcccatttgggccaaaattcctcacacagatggacactttcacccgtctcctcttatgggcggctttggactcaagaacccgcctcctcagatcctcatcaaaaacacgcctgttcctgcgaatcctccggcggagttttcagctacaaagtttgcttcattcatcacccaatactccacaggacaagtgagtgtggaaattgaatgggagctgcagaaagaaaacagcaagcgctggaatcccgaagtgcagtacacatccaattatgcaaaatctgccaacgttgattttactgtggacaacaatggactttatactgagcctcgccccattggcacccgttaccttacccgtcccctg

SEQ ID NO: 673 - DNA, 2208 bp, synthetic construct
  misc_feature 1..2208: note = source = /note="Description of Artificial Sequence: Synthetic polynucleotide"
  source 1..2208: mol_type = other DNA
atggctgccgatggttatcttccagattggctcgaggacaacctctctgagggcattcgcgagtggtgggacttgaaacctggagccccgaagcccaaagccaaccagcaaaagcaggacgacggccggggtctggtgcttcctggctacaagtacctcggacccttcaacggactcgacaagggggagcccgtcaacgcggcggacgcagcggccctcgagcacgacaaggcctacgaccagcagctcaaagcgggtgacaatccgtacctgcggtataaccacgccgacgccgagtttcaggagcgtctgcaagaagatacgtcttttgggggcaacctcgggcgagcagtcttccaggccaagaagcgggttctcgaacctctcggtctggttgaggaaggcgctaagacggctcctggaaagaaacgtccggtagagcagtcgccacaagagccagactcctcctcgggcatcggcaagacaggccagcagcccgctaaaaagagactcaattttggtcagactggcgactcagagtcagtccccgatccacaacctctcggagaacctccagcaacccccgctgctgtgggacctactacaatggcttcaggcggtggcgcaccaatggcagacaataacgaaggcgccgacggagtgggtaatgcctcaggaaattggcattgcgattccacatggctgggcggcagagtcatcaccaccagcacccgcacctgggccttgcccacctacaataaccacctctacaagcaaatctccagtgcttcaacgggggccagcaacgacaaccactacttcggctacagcaccccctgggggtattttgatttcaacagattccactgccacttttcaccacgtgactggcagcgactcatcaacaacaattggggattccggcccaagagactcaacttcaaactcttcaacatccaagtcaaggaggtcacgacgaatgatggcgtcacaaccatcgctaataaccttaccagcacggttcaagtcttctcggactcggagtaccagcttccgtacgtcctcggctctgcgcaccagggctgcctccctccgttcccggcggacgtgttcatgattccgcaatacggctacctgacgctcaacaatggcagccaagccgtgggacgttcatccttttactgcctggaatatttcccttctcagatgctgagaacgggcaacaactctaccttcagctacacctttgaggaagtgcctttccacagcagctacgcgcacagccagagcctggaccggctgatgaatcctctcatcgaccaatacctgtattacctgaacagaactcaaaatcagtccggaagtgcccaaaacaaggacttgctgtttagccgtgggtctccagctggcatgtctgttcagcccaaaaactggctacctggaccctgttatcggcagcagcgcgtttctaaaacaaaaacagacaacaacaacagcaattttacctggactggtgcttcaaaatataacctcaatgggcgtgaatccatcatcaaccctggcactgctatggcctcacacaaagacgacgaagacaagttctttcccatgagcggtgtcatgatttttggaaaagagagcgccggagcttcaaacactgcattggacaatgtcatgattacagacgaagaggaaattaaagccactaaccctgtggccaccgaaagatttgggaccgtggcagtcaatttccagagcagcagcacagaccctgcgaccggagatgtgcatgctatgggaacattacctggcatggtgtggcaagatagagacgtgtacctgcagggtcccatttgggccaaaattcctcacacagatggacactttcacccgtctcctcttatgggcggctttggactcaagaacccgcctcctcagatcctcatcaaaaacacgcctgttcctgcgaatcctccggcggagttttcagctacaaagtttgcttcattcatcacccaatactccacaggacaagtgagtgtggaaattgaatgggagctgcagaaagaaaacagcaagcgctggaatcccgaagtgcagtacacatccaattatgcaaaatctgccaacgttgattttactgtggacaacaatggactttatactgagcctcgccccattggcacccgttaccttacccgtcccctg

SEQ ID NO: 674 - DNA, 2208 bp, synthetic construct
  misc_feature 1..2208: note = source = /note="Description of Artificial Sequence: Synthetic polynucleotide"
  source 1..2208: mol_type = other DNA
atggctgccgatggttatctcccagattggctcgaggacaacctctctgagggcattcgcgagtggtgggacttgaaacctggagccccgaagcccaaagccaaccagcaaaagcaggacgacggccggggtctggtgcttcctggctacaagtacctcggacccttcaacggactcgacaagggggagcccgtcagcgcggcggacgcagcggccctcgagcacgacaaggcctacgaccagcagctcaaagcgggtgacaatccgtacctgcggtataaccacgccgacgccgagtttcaggagcgtctgcaagaagatacgtcttttgggggcaacctcgggcgagcagtcttccaggccaagaagcgggttctcgaacctctcggtctggttgaggaaggcgctaagacggctcctggaaagaaacgtccggtagagcagtcgccacaagagccagactcctcctcgggcatcggcaagacaggccagcagcccgctaaagagagactcaattttggtcagactggcgactcagagtcagtccccgatccacaacctctcggagaacctccagcaacccccgctgctgtgggacctactacaatggcttcaggcggtggcgcaccaatggcagacaataacgaaggcgccgacggagtgggtaatgcctcaggaaattggcattgcgattccacatggctgggcgacagagtcatcaccaccagcacccgcacctgggccttgcccacctacaataaccacctctacaagcaaatctccagtgcttcaacgggggccagcaacgacaaccactacttcggctacagcaccccctgggggtattttgatttcaacagattccactgccacttttcaccacgtgactggcagcgactcatcaacaacaattggggattccggcccaagagactcaacttcaaactcttcaacatccaagtcaaggaggtcacgacgaatgatggcgtcacaaccatcgccaataaccttaccagcacggttcaagtcttctcggactcggagtaccagcttccgtacgtcctcggctctgcgcaccagggctgcctccctccgttcccggcggacgtgttcatgattccgcaatacggctacctgacgctcaacaatggcagccaagccgtgggacgttcatccttttactgcctggaatatttcccttctcagatgctgagaacgggcaacaactttaccttcagctacacctttgaggaagtgcctttccacagcagctacgcgcacagccagagcctggaccggctgatgaatcctctcatcgaccaatacctgtattacctgaacagaactcaaaatcagtccggaagtgcccaaaacaaggacttgctgtttagccgtgggtctccagctggcatgtctgttcagcccaaaaactggctacctggaccctgttatcggcagcagcgcgtttctaaaacaaaaacagacaacaacaacagcaattttacctggactggtgcttcaaaatataacctcaatgggcgtgaatccatcatcaaccctggcactgctatggcctcacacaaagacgacgaagacaagttctttcccatgagcggtgtcatgatttttggaaaagagagcgccggagcttcaaacactgcattggacaatgtcatgattacagacgaagaggaaattaaagccactaaccctgtggccaccgaaagatttgggaccgtggcagtcaatttccagagcagcagcacagaccctgcgaccggagatgtgcatgctatgggagcattacctggcatggtgtggcaagatagagacgtgtacctgcagggtcccatttgggccaaaattcctcacacagatggacactttcacccgtctcctcttatgggcggctttggactcaagaacccgcctcctcagatcctcatcaaaaacacgcctgttcctgcgaatcctccggcggagttttcagctacaaagtttgcttcattcatcacccaatactccacaggacaagtgagtgtggaaattgaatgggagctgcagaaagaaaacagcaagcgctggaatcccgaagtgcagtacacatccaattatgcaaaatctgccaacgttgattttactgtggacaacaatggactttatactgagcctcgccccattggcacccgttaccttacccgtcccctg

SEQ ID NO: 675 - DNA, 2208 bp, synthetic construct
  misc_feature 1..2208: note = source = /note="Description of Artificial Sequence: Synthetic polynucleotide"
  source 1..2208: mol_type = other DNA
atggctgccgatggttatcttccagattggctcgaggacaacctctctgagggcattcgcgagtggtgggacttgaaacctggagccccgaagcccaaagccaaccagcaaaagcaggacgacggccggggtctggtgcttcctggctacaagtacctcggacccttcaacggactcgacaagggggagcccgtcaacgcggcggacgcagcggccctcgagcacgacaaggcctacgaccagcagctcaaagcgggtgacaatccgtacctgcggtataaccacgccgacgccgagtttcaggagcgtctgcaagaagatacgtcttttgggggcaacctcgggcgagcagtcttccaggccaagaagcgggttctcgaacctctcggtctggttgaggaaggcgctaagacggctcctggaaagaaacgtccggtagagcagtcgccacaagagccagactcctcctcgggcatcggcaagacaggccagcagcccgctaaaaagagactcaattttggtcagactggcgactcagagtcagtccccgatccacaacctctcggagaacctccagcaacccccgctgctgtgggacctactacaatggcttcaggcggtggcgcaccaatggcagacaataacgaaggcgccgacggagtgggtaatgcctcaggaaattggcattgcgattccacatggctgggcgacagagtcatcaccaccagcacccgcacctgggccttgcccacctacaataaccacctctacaagcaaatctccagtgcttcaacgggggccagcaacgacaaccactacttcggctacagcaccccctgggggtattttgatttcaacagattccactgccacttttcaccacgtgactggcagcgactcatcaacaacaattggggattccggcccaagagactcaacttcaaactcttcaacatccaagtcaaggaggtcacgacgaatgatggcgtcacaaccatcgctaataaccttaccagcacggttcaagtcttctcggactcggagtaccagcttccgtacgtcctcggctctgcgcaccagggctgcctccctccgttcccggcggacgtgttcatgattccgcaatacggctacctgacgctcaacaatggcagccaagccgtgggacgttcatccttttactgcctggaatatttcccttctcagatgctgagaacgggcaacaactttaccttcagctacacctttgaggaagtgcctttccacagcagctacgcgcacagccagagcctggaccggctgatgaatcctctcatcgaccaatacctgtattacctgaacagaactcaaaatcagtccggaagtgcccaaaacaaggacttgctgtttagccgtgggtctccagctggcatgtctgttcagcccaaaaactggctacctggaccctgttatcggcagcagcgcgtttctaaaacaaaaacagacaacaacaacagcaattttacctggactggtgcttcaaaatataacctcaatgggcgtgaatccatcatcaaccctggcactgctatggcctcacacaaagacgacgaagacaagttctttcccatgagcggtgtcatgatttttggaaaagagagcgccggagcttcaaacactgcattggacaatgtcatgattacagacgaaggggaaattaaagccactaaccctgtggccaccgaaagatttgggaccgtggcagtcaatttccagagcagcagcacagaccctgcgaccggagatgtgcatgctatgggagcattacctggcatggtgtggcaagatagagacgtgtacctgcagggtcccatttgggccaaaattcctcacacagatggacactttcacccgtctcctcttatgggcggctttggactcaagaacccgcctcctcagatcctcatcaaaaacacgcctgttcctgcgaatcctccggcggagttttcagctacaaagtttgcttcattcatcacccaatactccacaggacaagtgagtgtggaaattgaatgggagctgcagaaagaaaacagcaagcgctggaatcccgaagtgcagtacacatccaattatgcaaaatctgccaacgttgattttactgtggacaacaatggactttatactgagcctcgccccattggcacccgttaccttacccgtcccctg

SEQ ID NO: 676 - DNA, 2208 bp, synthetic construct
  misc_feature 1..2208: note = source = /note="Description of Artificial Sequence: Synthetic polynucleotide"
  source 1..2208: mol_type = other DNA
atggctgccgatggttatcttccagattggctcgaggacaacctctctgagggcattcgcgagtggtgggacttgaaacctggagccccgaaacctaaagccaaccagcaaaagcaggacgacggccggggtctggtgcttcctggctacaagtacctcggacccttcaacggactcgacaagggggagcccgtcaacgcggcggacgcagcggccctcgagcacgacaaggcctacgaccagcagctcaaagcgggtgacaatccgtacctgcggtataaccacgccgacgccgagtttcaggagcgtctgcaagaagatacgtcttttgggggcaacctcgggcgagcagtcttccaggccaagaagcgggttctcgaaccttttggtctggttgaggaaggcgctaagacggctcctggaaagaaacgtccggtagagcagtcgccacaagagccagactcctcctcgggcatcggcaagacaggccagcagcccgctaaaaagagactcaattttggtcagactggcgactcagagtcagtccccgacccacaacctctcggagaacctccagcaacccccgctgctgtgggacctactacaatggcttcaggcggtggcgcaccaatggcagacaataacgaaggcgccgacggagtgggtaatgcctcaggaaattggcattgcgattccacatggctgggcgacagagtcatcaccaccagcacccgcacctgggccttgcccacctacaataaccacctctacaagcaaatctccagtgcttcaacgggggccagcaacgacaaccactacttcggctacagcaccccctgggggtattttgatttcaacagattccactgccacttttcaccacgtgactggcagcgactcatcaacaacaattggggattccggcccaagagactcaacttcaagctcttcaacatccaagtcaaggaggtcacgacgaacgatggcgtcacgaccatcgctaataaccttaccagcacggttcaagtcttctcggattcagagtaccaactgccgtacgtcctcggctctgcgcaccagggctgcctccctccgttcccggcggacgtgtttatgattccgcagtacggctacctaacgctcaacaatggcagccaggccgtgggacgttcatccttttactgcccggaatatttcccttctcagatgctgagaacgggcaacaactttaccttcagctacacctttgaggaagtgcctttccacagcagctacgcgcacagccagagcctggaccggctgatgaatcctctcatcgaccaatacctgtattacctgaacagaactcaaaatcagtccggaagtgcccaaaacaaggacttgctgtttagccgtgggtctccagctggcatgtctgttcagcccaaaaactggctacctggaccctgttatcggcagcagcgcgtttctaaaacaaaaacagacaacaacaacagcaattttacctggactggtgcttcaaaatataacctcaatgggcgtgaatccatcatcaaccctggcactgctatggcctcacacaaagacgacaaagacaagttctttcccatgagcggtgtcatgatttttggaaaagagagcgccggagcttcaaatactgcattggacaatgtcatgatcacagatgaagaggaaattaaagccactaaccctgtggccaccgaaagatttgggaccgtggcagtcaatttccagagcagcaacacagaccccgcgaccggagatgtgcatgttatgggagccttacctggcatggtgtggcaagacagagacgtatacctgcagggtcccatttgggccaaaattcctcacacggatggacactttcacccgtctcctctcatgggcggctttggacttaagcacccgcctcctcaaatcctcatcaaaaacacgcctgttcctgcgaatcctccggcagagttttcggctacaaagtttgcttcattcatcacccagtactccacaggacaagtgagtgtggaaattgaatgggagctgcagaaagaaaacagcaagcgctggaatcccgaagtgcagtacacatccaattatgcaaaatctgccaacgttgatttcactgtggacaacaatggactttatactgagcctcgccccattggcacccgttaccttacccgtcccttg

SEQ ID NO: 677 - DNA, 2208 bp, synthetic construct
  misc_feature 1..2208: note = source = /note="Description of Artificial Sequence: Synthetic polynucleotide"
  source 1..2208: mol_type = other DNA
atggctgccgatggttatcttccagattggctcgaggacaacctctctgagggcattcgcgagtggtgggacttgaaacctggagccccgaaacctaaagccaaccagcaaaagcaggacgacggccggggtctggtgcttcctggctacaagtacctcggacccttcaacggactcgacaagggggagcccgtcaacgcggcggacgcagcggccctcgagcacgacaaggcctacgaccagcagctcaaagcgggtgacaatccgtacctgcggtataaccacgccgacgccgagtttcaggagcgtctacaagaagatacgtcttttgggggcaacctcgggcgagcagtcttccaggccaagaagcgggttctcgaaccttttggtctggttgaggaaggcgctaagacggctcctggaaagaaacgtccggtagagcagtcgccacaagagccagactcctcctcgggcatcggcaagacaggccagcagcccgctaaaaagagactcaattttggtcagactggcgactcagagtcagtccccgacccacaacctctcggagaacctccagcaacccccgctgctgtgggacctactacaatggcttcaggcggtggcgcaccaatggcagacaataacgaaggcgccgacggagtgggtaatgcctcaggaaattggcattgcgattccacatggctgggcgacagagtcatcaccaccagcacccgcacctgggccttgcccacctacaataaccacctctacaagcaaatctccagtgcttcaacgggggccagcaacgacaaccactacttcggctacagcaccccctgggggtattttgatttcaacagattccactgccacttttcaccacgtgactggcagcgactcatcaacaacaattggggattccggcccaagagactcaacttcaagctcttcaacatccaagtcaaggaggtcacgacgaacgatggcgtcacgaccatcgctaataaccttaccagcacggttcaagtcttctcggattcagagtaccaactgccgtacgtcctcggctctgcgcaccagggctgcctccctccgttcccggcggacgtgttcatgattccgcagtacggctacctaacgctcaacaatggcagccaggccgtgggacgttcatccttttactgcctggaatatttcccttctcagatgctgagaacgggcaacaactttaccttcagctacacctttgaggaagtgcctttccacagcagctacgcgcacagccagagcctggaccggctgatgaatcctctcatcgaccaatacctgtattacctgaacagaactcaaaatcagtccggaagtgcccaaaacaaggacttgctgtttagccgtgggtctccagctggcatgtctgttcagcccaaaaactggctacctggaccctgttatcggcagcagcgcgtttctaaaacaaaaacagacaacaacaacagcaattttacctggactggtgcttcaaaatataacctcaatgggcgtgaatccatcatcaaccctggcactgctatggcctcacacaaagacgacaaagacaagttctttcccatgagcggtgtcatgatttttggaaaagagagcgccggagcttcaaatactgcattggacaatgtcatgatcacagatgaagaggaaattaaagccactaaccctgtggccaccgaaagatttgggaccgtggcagtcaatttccagagcagcgacacagaccccgcgaccggagatgtgcatgttatgggagccttacctggcatggtgtggcaagacagagacgtatacctgcagggtcccatttgggccaaaattcctcacacggatggacactttcacccgtctcctctcatgggcggctttggacttaagcacccgcctcctcaaatcctcatcaaaaacacgcctgttcctgcgaatcctccggcagagttttcggctacaaagtttgcttcattcatcacccagtactccacaggacaagtgagtgtggaaattgaatgggagctgcagaaagaaaacagcaagcgctggaatcccgaagtgcagtacacatccaattatgcaaaatctgccaacgttgatttcactgtggacaacaatggactttatactgagcctcgccccattggcacccgttaccttacccgtcccttg

SEQ ID NO: 678 - DNA, 2208 bp, synthetic construct
  misc_feature 1..2208: note = source = /note="Description of Artificial Sequence: Synthetic polynucleotide"
  source 1..2208: mol_type = other DNA
atggctgccgatggttatcttccagattggctcgaggacaacctctctgagggcattcgcgagtggtgggacttgaaacctggagccccgaaacctaaagccaaccagcaaaagcagggcgacggccggggtctggtgcttcctggctacaagtacctcggacccttcaacggactcgacaagggggagcccgtcaacgcggcggacgcagcggccctcgagcacgacaaggcctacgaccagcagctcaaagcgggtgacaatccgtacctgcggtataaccacgccgacgccgagtttcaggagcgtctgcaagaagatacgtcttttgggggcaacctcgggcgagcagtcttccaggccaagaagcgggttctcgaaccttttggtctggttgaggaaggcgctaagacggctcctggaaagaaacgtccggtagagcagtcgccacaagagccagactcctcctcgggcatcggcaagacaggccagcagcccgctaaaaagagactcaattttggtcagactggcgactcagagtcagtccccgacccacaacctctcggagaacctccagcaacccccgctgctgtgggacctactacaatggcttcaggcggtggcgcaccaatggcagacaataacgaaggcgccgacggagtgggtaatgcctcaggaaattggcattgcgattccacatggctgggcgacagagtcatcaccaccaacactcgcacctgggccttgcccacctacaataaccacctctacaagcaaatctccagtgcttcaacgggggccagcaacgacaaccactacttcggctacagcaccccctgggggtattttgatttcaacagattccactgccacttttcaccacgtgactggcagcgactcatcaacaacaattggggattccggcccaagagactcaacttcaagctcttcaacatccaagtcaaggaggtcacgacgaacgatggcgtcacgaccatcgctaataaccttaccagcacggttcaagtcttctcggattcagagtaccaactgccgtacgtcctcggctctgcgcaccagggctgcctccctccgttcccggcggacgtgttcatgattccgcagtacggctacctaacgctcaacaatggcagccaggccgtgggacgttcatccttttactgcctggaatatttcccttctcagatgctgagaacgggcaacaactttaccttcagctacacctttgaggaagtgcctttccacagcagttacgggcacagccagagcctggaccggctgatgaatcttctcatcgaccaatacctgtattacctgaacagaactcaaaatcagtccggaagtgcccaaaacaaggacttgctgtttagccgtgggtctccagctggcatgtttgttcagcccaaaaactggctacctggaccctgttatcggcagcagcgcgtttctaaaacaaaaacagacaacaacaacagcaattttacctggactggtgcttcaaaatataacctcaatgggcgtgaatccatcatcaaccctggcactgctatggcctcacacaaagacgacgaagacaagttctttcccatgagcggtgtcatgatttttggaaaagagagcgccggagcttcaaatactgcattggacaatgtcatgatcacagatgaagaggaaattaaagccactaaccctgtggccaccgaaagatttgggaccgtggcagtcaatttccagagcagcagcacagaccccgcgaccggagatgtgcatgttatgggagccttacctggcatggtgtggcaagacagagacgtatacctgcagggtcccatttgggccaaaattcctcacacggatggacactttcacccgtctcctctcatgggcggctttggacttaagcacccgcctcctcaaatcctcatcaaaaacacgcctgttcctgcgaatcctccggcagagttttcggctacaaagtttgcttcattcatcacccagtactccacaggacaagtgagtgtggaaattgaatgggagctgcagaaagaaaacagcaagcgctggaatcccgaagtgcagtacacatccaattatgcaaaatctgccaacgttgatttcactgtggacaacaatggactttatactgagcctcgccccattggcacccgttaccttacccgtcccttg

SEQ ID NO: 679 - DNA, 2208 bp, synthetic construct
  misc_feature 1..2208: note = source = /note="Description of Artificial Sequence: Synthetic polynucleotide"
  source 1..2208: mol_type = other DNA
atggctgccgatggttatcttccagattggctcgaggacaacctctctgagggcattcgcgagtggtgggacttgaaacctggagccccgaaacctaaagccaaccagcaaaagcaggacgacggccggggtctggtgcttcctggctacaagtacctcggacccttcaacggactcgacaagggggagcccgtcaacgcggcggacgcagcggccctcgagcacgacaaggcctacgaccagcagctcaaagcgggtgacaatccgtacctgcggtataaccacgccgacgccgagtttcaggagcgtctgcaagaagatacgtcttttgggggcaacctcgggcgagcagtcttccaggccaagaagcgggttctcgaaccttttggtctggttgaggaaggcgctaagacggctcctggaaagaaacgtccggtagagcagtcgccacaagagccagactcctcctcgggcatcggcaagacaggccagcagcccgctaaaaagagactcaattttggtcagactggcgactcagagtcagtccccgacccacaacctctcggagaacctccagcaacccccgctgctgtgggacctactacaatggcttcaggcggtggcgcaccaatggcagacaataacgaaggcgccgacggagtgggtaatgcctcaggaaattggcattgcgattccacatggctgggcgacagagtcatcaccaccaacacccgcacctgggccttgcccacctacaataaccacctctacaagcaaatctccagtgcttcaacgggggccagcaacgacaaccactacttcggctacagcaccccctgggggtattttgatttcaacagattccactgccacttttcaccacgtgactggcagcgactcatcaacaacaattggggattccggcccaagagactcaacttcaagctcttcaacatccaagtcaaggaggtcacgacgaacgatggcgtcacgaccatcgctaataaccttaccagcacggttcaagtcttctcggattcagagtaccaactgccgtacgtcctcggctctgcgcaccagggctgcctccctccgttcccggcggacgtgttcatgattccgcagtacggctacctaatgctcaacaatggcagccaggccgtgggacgttcatccttttactgcctggaatatttcccttctcagatgctgagaacgggcaacaactttaccttcagctacacctttgaggaagtgcctttccacagcagctacgcgcacagccagagcctggaccggctgatgaatcctctcatcgaccaatacctgtattacctgaacagaactcaaaatcagtccggaagtgcccaaaacaaggacttgctgtttagccgtgggtctccagctggcatgtctgttcagcccaaaaactggctacctggaccctgttatcggcagcagcgcgtttctaaaacaaaaacagacaacaacaacagcaattttacctggactggtgcttcaaaatataacctcaatgggcgtgaatccatcatcaaccctggcactgctatggcctcacacaaagacgacgaagacaagttctttcccatgagcggtgtcatgatttttggaaaagagagcgccggagcttcaaatactgcattggacaatgtcatgatcacagatgaagaggaaattaaagccactaaccctgcggccaccgaaagatttgggaccgtggcagtcaatttccagagcagcagcacagaccccgcgaccggagatgtgcatgttatgggagccttacctggcatggtgtggcaagacagagacgtatacctgcagggtcccatttgggccaaaattcctcacacggatggacactttcacccgtctcctctcatgggcggctttggacttaagcacccgcctcctcaaatcctcatcaaaaacacgcctgttcctgcgaatcctccggcagagttttcggctacaaagtttgcttcattcatcacccagtactccacaggacaagtgagtgtggaaattgaatgggagctgcagaaagaaaacagcaagcgctggaatcccgaagtgcagtacacatccaattatgcaaaatctgccaacgttgatttcactgtggacaacaatggactttatactgagcctcgccccattggcacccgttaccttacccgtcccttg

SEQ ID NO: 680 - DNA, 2208 bp, synthetic construct
  misc_feature 1..2208: note = source = /note="Description of Artificial Sequence: Synthetic polynucleotide"
  source 1..2208: mol_type = other DNA
atggctgccgatggttatcttccagattggctcgaggacaacctctctgagggcattcgcgagtggtgggacttgaaacctggagccccgaaacctaaagccaaccagcaaaagcaggacgacggccggggtctggtgcttcctggctacaagtacctcggacccttcaacggactcgacaagggggagcccgtcaacgcggcggacgcagcggccctcgagcacgacaaggcctacgaccagcagctcaaagcgggtgacaatccgtacctgcggtataaccacgccgacgccgagtttcaggagcgtctgcaagaagatacgtcttttgggggcaacctcgggcgagcagtcttccaggccaagaagcgggttctcgaaccttttggtctggttgaggaaggcgctaagacggctcctggaaagaaacgtccggtagagcagtcgccacaagagccagactcctcctcgggcatcggcaagacgggccagcagcccgctaaaaagagactcaattttggtcagactggcgactcagagtcagtccccgacccacaacctctcggagaacctccagcaacccccgctgctgtgggacctactacaatggcttcaggcggtggcgcaccaatggcagacaataacgaaggcgccgacggagtgggtaatgcctcaggaaattggcattgcgattccacatggctgggcgacagagtcatcaccaccagcacccgcacctgggccttgcccacctacaataaccacctctacaagcaaatctccagtgcttcaacgggggccagcaacgacaaccactacttcggctacagcaccccctgggggtattttgatttcaacagattccactgccacttttcaccacgtgactggcagcgactcatcaacaacaattggggattccggcccaagagactcaacttcaagctcttcaacatccaagtcaaggaggtcacgacgaacgatggcgtcacgaccatcgctaataaccttaccagcacggttcaagtcttctcggattcagagtaccaactgccgtacgtcctcggctctgcgcaccagggctgcctccctccgttcccggcggacgtgttcatgattccgcagtacggctacctaacgctcaacaatggcagccaggccgtgggacgttcatccttttactgcctggaatatttcccttctcagatgctgagaacgggcaacaactttaccttcagctacacctttgaggaagtgcctttccacagcagctacgcgcacagccagagcctggaccggctgatgaatcctctcatcgaccaatacctgtattacctgaacagaactcaaaatcagtccggaagtgcccaaaacaaggacttgctgtttagccgtgggtctccagctggcatgtccgttcagcccaaaaactggctacctggaccctgttatcggcagcagcgcgtttctaaaacaaaaacagacaacaacaacagcaattttacctggactggtgcttcaaaatataacctcaatgggcgtgaatccatcatcaaccctggcactgctatggcctcacacaaagacgacgaagacaagttctttcccatgagcggtgtcatgatttttggaaaagagagcgccggagcttcaaatactgcattggacaatgtcatgatcacagatgaagaggaaattaaagccactaaccctgtggccaccgaaagatttgggaccgtggcagtcaatttccagagcagcagcacagaccccgcgaccggagatgtgcatgttatgggagccttacctggcatggtgtggcaagacagagacgtatacctgcagggtcccatttgggccaaaattcctcacacggatggacactttcacccgtctcctctcatgggcggctttggacttaagcacccgcctcctcaaatcctcatcaaaaacacgcctgttcctgcgaatcctccggcagagttttcggctacaaagtttgcttcattcatcacccagtactccacaggacaagtgagtgtggaaattgaatgggagctgcagaaagaaaacagcaagcgctggaatcccgaagtgcagtacacatccaattatgcaaaatctgccaacgttgatttcactgtggacaacaatggactttatactgagcctcgccccattggcacccgttaccttacccgtcccttg

SEQ ID NO: 681 - DNA, 2208 bp, synthetic construct
  misc_difference 305: note = modified_base - a, c, t, or g
  misc_feature 1..2208: note = source = /note="Description of Artificial Sequence: Synthetic polynucleotide"
  source 1..2208: mol_type = other DNA
atggctgccgatggttatcttccagattggctcgaggacaacctctctgagggcattcgcgagtggtgggacttgaaacctggagccccgaaacctaaagccaaccagcaaaagcaggacgacggccggggtctggtgcttcctggctacaagtacctcggacccttcaacggactcgacaagggggagcccgtcaacgcggcggacgcagcggccctcgagcacgacaaggcctacgaccagcagctcaaagcgggtgacaatccgtacctgcggtataaccacgccgacgccgagtttcaggngcgtctgcaagaagatacgtcttttgggggcaacctcgggcgagcagtcttccaggccaagaagcgggttctcgaaccttttggtctggttgaggaaggcgctaagacggctcctggaaagaaacgtccggtagagcagtcgccacaagagccagactcctcctcgggcatcggcaagacaggccagcagcccgctaaaaagagactcaattttggtcagactggcgactcagagtcagtccccgacccacaacctctcggagaacctccagcaacccccgctgctgtgggacctactacaatggcttcaggcggtggcgcaccaatggcagacaataacgaaggcgccgacggagtgggtaatgcctcaggaaattggcattgcgattccacatggctgggcggcagagtcatcaccaccagcacccgcacctgggccttgcccacctacaataaccacctctacaagcaaatctccagtgcttcaacgggggccagcaacgacaaccactacttcggccacagcaccccctgggggtattttgatttcaacagattccactgccacttttcaccacgtgactggcagcgactcatcaacaacaattggggattccggcccaagagactcaacttcaagctcttcaacatccaagtcaaggaggtcacgacgaacgatggcgtcacgaccatcgctaataaccttaccagcacggttcaagtcttctcggattcagagtaccaactgccgtacgtcctcggctctgcgcaccagggctgcctccctccgtccccggcggacgtgttcatgattccgcagtacggctacctaacactcaacaatggcagccaggccgtgggacgttcatccttttactgcctggaatatttcccttctcagatgctgagaacgggcaacaactttaccttcagctacacctttgaggaagtgcctttccacagcagctacgcgcacagccagagcctggaccggctgatgaatcctctcatcgaccaatacctgtattacctgaacagaactcaaaatcagtccggaagtgcccaaaacaaggacttgctgtttagccgtgggtctccagctggcatgtctgttcagcccaaaaactggctacctggaccctgttatcggcagcagcgcgtttctaaaacaaaaacagacaacaacaacagcaattttacctggactggtgcttcaaaatataacctcaatgggcgtgaatccatcatcaaccctggcactgctatggcctcacacaaagacgacaaagacaagttctttcccatgagcggtgtcatgatttttggaaaagagagcgccggagcttcaaatactgcattggacaatgtcatgatcacagatgaagaggaaattaaagccactaaccctgtggccaccgaaagatttgggaccgtggcagtcaatttccagagcagcaacacagaccccgcgaccggagatgtgcatgttatgggagccttacctggcatggtgtggcaagacagagacgtatacctgcagggtcccatttgggccaaaattcctcacacggatggacactttcacccgtctcctctcatgggcggctttggacttaagcacccgcctcctcaaatcctcatcaaaaacacgcctgttcctgcgaatcctccggcagagttttcggctacaaagtttgcttcattcatcacccagtactccacaggacaagtgagtgtggaaattgaatgggagctgcagaaagaaaacagcaagcgctggaatcccgaagtgcagtacacatccaattatgcaaaatctgccaacgttgatttcactgtggacaacaatggactttatactgagcctcgccccattggcacccgttaccttacccgtcccttg

SEQ ID NO: 682 - DNA, 2208 bp, synthetic construct
  misc_feature 1..2208: note = source = /note="Description of Artificial Sequence: Synthetic polynucleotide"
  source 1..2208: mol_type = other DNA
atggctgccgatggttattttccagattggctcgaggacaacctttctgagggcattcgcgagtggtgggacttgaaacctggagccccgaaacctaaagccaaccagcaaaagcaggacgacggccggggtctggtgcttcctggctacaagtacctcggacccttcaacggactcgacaagggggagcccgtcaacgcggcggacgcagcggccctcgagcacgacaaggcctacgaccagcagctcaaagcgggtgacaatccgtacctgcggtataaccacgccgacgccgagtttcaggagcgtctgcaagaagatacgtcttttgggggcaacctcgggcgagcagtcttccaggccaagaagcgggttctcgaaccttttggtctggttgaggaaggcgctaagacggctcctggaaagaaacgtccggtagagcagtcgccacaagagccagactcctcctcgggcatcggcaggacaggccagcagcccgctaaaaagagactcaattttggtcagactggcgactcagagtcagtccccgacccacaacctctcggagaacctccagcgacccccgctgctgtgggacctactacaatggcttcaggcggtggcgcaccaatggcagacaataacgaaggtgccgacggagtgggtaatgcctcaggaaattggcattgcgattccacatggctgggcgacagagtcatcaccaccagcacccgcacctgggccttgcccacctacaataaccacctctacaagcaaatctccagtgcttcaacgggggccagcaacgacaaccactacttcggctacagcaccccctgggggtattttgatttcaacagattccactgccacttttcaccacgtgactggcagcgactcatcaacaacaattggggattccggcccaagagactcaacttcaagctcttcaacatccaagtcaaggaggtcacgacgaacgatggcgtcacgaccatcgctaataaccttaccagcacggttcaagtcttctcggattcagagtaccaactgccgtacgtcctcggctctgcgcaccagggctgcctccctccgttcccggcggacgtgttcatgattccgcagtacggctacctaacgctcaacaatggcagccaggccgtgggacgttcatccttttactgcctggaatatttcccttctcagatgctgagaacgggcaacaactttaccttcagctacacctttgaggaagtgcctttccacagcagctacgcgcacagccagagcctggaccggctgatgaatcctctcatcgaccaatacctgtattacctgaacagaactcaaaatcagtccggaagtgcccaaaacaaggacttgctgtttagccgtgggtctccagctggcatgtctgttcagcccaaaaactggctacctggaccctgttatcggcagcagcgcgtttctaaaacaaaaacagacaacaacaacagcaattttacctggactggtgcttcaaaatataacctcaatgggcgtgaatccatcatcaaccctggcactgctatggcctcacacaaagacgacgaagacaagttctttcccatgagcggtgtcatgatttttggaaaagagagcgccggagcttcaaatactgcattggacaatgtcatgatcacagatgaagaggaaattaaagccactaaccctgtggccaccgaaagatttgggaccgtggcagtcaatttccagagcagcagcccagaccccgcgaccggagatgtgcatgttatgggagccttacctggcatggtgtggcaagacagagacgtatacctgcagggtcccatttgggccaaaattcctcacacggatggacactttcacccgtctcctctcatgggcggctttggacttaagcacccgcctcctcaaatcctcatcaaaaacacgcctgttcctgcgaatcctccggcagagttttcggctacaaagtttgcttcattcatcacccagtactccacaggacaagtgagtgtggaaattgaatgggagctgcagaaagaaaacagcaagcgctggaatcccgaagtgcagtacacatccaattatgcaaaatctgccaacgttgatttcactgtggacaacaatggactttatagtgagcctcgccccattggcacccgttaccttacccgtcccttg

SEQ ID NO: 683 - DNA, 2208 bp, synthetic construct
  misc_feature 1..2208: note = source = /note="Description of Artificial Sequence: Synthetic polynucleotide"
  source 1..2208: mol_type = other DNA
atggctgccgatggttatcttccagattggctcgaggacaacctctctgagggcattcgcgagtggtgggacttgaaacctggagccccgaaacctaaagccaaccagcaaaagcaggacgacggccggggtctggtgcttcctggctacaagtacctcggacccttcaacggactcgacaagggggagcccgtcaacgcggcggacgcagcggccctcgagcacgacaaggcctacgaccagcagctcaaagcgggtgacaatccgtacctgcggtataaccacgccgacgccgagtttcaggagcgtctgcaagaagatacgtcttttgggggcaacctcgggcgagcagtcttccaggccaagaagcgggttctcgaaccttttggtctggttgaggaaggcgctaagacggctcctggaaagaaacgtccggtagagcagtcgccacaagagccagactcctcctcgggcatcggcaagacaggccagcagcccgctaaaaagagactcaattttggtcagactggcgactcagagtcagtccccgacccacaacctctcggagaacctccagcaacccccgctgctgtgggacctactacaatggcttcaggcggtggcgcaccaatggcagacaataacgaaggcgccgacggagtgggtaatgcctcaggaaattggcattgcgattccacatggctgggcgacagagtcatcaccaccagcacccgcacctgggccttgcccacctacaataaccacctctacaagcaaacctccagtgcttcaacgggggccagcaacgacaaccactacttcggctacagcaccccctgggggtattttgatttcaacagattccactgccacttttcaccacgtgactggcagcgactcatcaacaacaattggggattccggcccaagagactcaacttcaagctcttcaacatccaagtcaaggaggtcacgacgaacgatggcgtcacgaccatcgctaataaccttaccagcacggttcaagtcttctcggattcagagtaccaactgccgtacgtcctcggctctgcgcaccagggctgcctccctccgttcccggcggacgtgttcatgattccgcagtacggctacctaacgctcaacaatggcagccaggccgtgggacgttcatccttttactgcctggaatatttcccttctcagatgctgagaacgggcaacaactttaccttcagctacacctttgaggaagtgcctttccacagcagctacgcgcacagccagagcctggaccggctgatgaatcctctcatcgaccaatacctgtattacctgaacagaactcaaaatcagtccggaagtgcccaaaacaaggacttgctgtttagccgtgggtctccagctggcatgtctgttcagcccaaaaactggctacctggaccctgttatcggcagcagcgcgtttctaaaacaaaaacagactacaacaacagcaattttacctggactggtgcttcaaaatataacctcaatgggcgtgaatccatcatcaaccctggcactgctatggcctcacacaaagacgacgaagacaagttctttcccatgagcggtgtcatgatttttggaaaagagagcgccggagcttcaaatactgcattggacaatgtcatgatcacagatgaagaggaaattaaagccactaaccctgtggccaccgaaagatttgggaccgtggcagtcaatttccagagcagcagcacagaccccgcgaccggagatgtgcatgttatgggagccttacctggcatggtgtggcaagacagagacgtatacctgcagggtcccatttgggccaaaattcctcacacggatggacactttcacccgtctcctctcatgggcggctttggacttaagcacccgcctcctcaaatcctcatcaaaaacacgcctgttcctgcgaatcctccggcagagttttcggctacaaagtttgcttcattcatcacccagtactccacaggacaagtgagtgtggaaattgaatgggagctgcagaaagaaaacagcaagcgctggaatcccgaagtgcagtacacatccaattatgcaaaatctgccaacgttgatttcactgtggacaacaatggactttatactgagcctcgccccattggcacccgttaccttacccgtcccttg

SEQ ID NO: 684 - DNA, 2208 bp, synthetic construct
  misc_feature 1..2208: note = source = /note="Description of Artificial Sequence: Synthetic polynucleotide"
  source 1..2208: mol_type = other DNA
atggctgccgatggttatcctccagattggctcgaggacaacctctctgagggcattcgcgagtggtgggacttgaaacctggagtcccgaaacctaaagccaaccagcaaaagcaggacgacggccggggtctggtgcttcctggctacaagtacctcggacccttcaacggactcgacaagggggagcccgtcaacgcggcggacgcagcggccctcgagcacgacaaggcctacgaccagcagctcaaagcgggtgacaatccgtacctgcggtataaccacgccgacgccgagtttcaggagcgtctgcaagaagatacgtcttttgggggcaacctcgggcgagcagtcttccaggccaagaagcgggttctcgaaccttttggtctggttgaggaaggcgctaagacggctcctggaaagaaacgtccggtagagcagtcgccacaagagccagactcctcctcgggcatcggcaagacaggccagcagcccgctaaaaagagactcaattttggtcagactggcgactcagagtcagtccccgacccacaacctctcggagaacctccagcaacccccgctgctgtgggacctactacaatggcttcaggcggtggcgcaccaatggcagacaataacgaaggcgccgacggagtgggtaatgcctcaggaaattggcattgcgattccacatggctgggcgacagagtcatcaccaccagcacccgcacctgggccttgcccacctacaataaccacctctacaagcaaatctccagtgcttcaacgggggccagcaacgacaaccactacttcggctacagcaccccctgggggtattttgatttcaacagattccactgccacttttcaccacgtgactggcagcgactcatcaacaacaattggggattccggcccaagagactcaacttcaagctcttcaacatccaagtcaaggaggtcacgacgaacgatggcgtcacgaccatcgctaataaccttaccagcacggttcaagtcttctcggattcagagtaccaactgccgtacgtcctcggctctgcgcaccagggctgcctccctccgttcccggcggacgtgttcatgattccgcagtacggctacctaacgctcaacaatggcagccaggccgtgggacgttcatccttttactgcctggaatatttcccttctcagatgctgagaacgggcaacaactttaccttcagctacacctttgaggaagtgcctttccacagcagctacgcgcacagccagagcctggaccggctgatgaatcctctcatcgaccaatacctgtattacctgaacagaactcaaaatcagtccggaagtgcccaaaacaaggacttgctgtttagccgtgggtctccagctggcatgtctgttcagcccaaaaactggctacctggaccctgttatcggcagcagcgcgtttctaaaacaaaaacagacaacaacaacagcaattttacctggactggtgcttcaaaatataacctcaatgggcgtgaatccatcatcaaccctggcactgctatggcctcacacaaagacgacgaagacaagttctttcccatgagcggtgtcatgatttttggaaaagagagcgccggagcttcaaatactgcattggacaatgtcatgatcacagatgaagaggaaattaaagccactaaccctgtggccaccgaaagatttgggaccgtggcagtcaatttccagagcagcagcacagaccccgcgaccggagatgtgcatgttatgggagccttacctggcatggtgtggcaagacagagacgtatacctgcagggtcccatttgggccaaaattcctcacacggatggacactttcacccgtctcctctcatgggcggctttggacttaagcacccgcctcctcaaatcctcatcaaaaacacgcctgttcctgcgaatcctccggcagagttttcggctacaaagtttgcttcattcatcacccagtactccacaggacaagtgagtgtggaaattgaatgggagctgcagaaagaaaacagcaagcgctggaatcccgaagtgcagtacacatccaattatgcaaaatctgccaacgttgatttcactgtggacaacaatggactttatactgagcctcgccccattggcacccgttaccttacccgtcccttg

SEQ ID NO: 685 - DNA, 2196 bp, synthetic construct
  misc_feature 1..2196: note = source = /note="Description of Artificial Sequence: Synthetic polynucleotide"
  source 1..2196: mol_type = other DNA
atggctgccgatggttatcttccagattggctcgaggacaacctctctgagggcattcgcgagtggtgggacttgaaacctggagccccgaaacctaaagccaaccagcaaaagcaggacgacggccggggtctggtgcttcctggctacaagtacctcggacccttcaacggactcgacaagggggagcccgtcaacgcggcggacgcagcggccctcgagcacgacaaggcctacgaccagcagctcaaagcgggtgacaatccgtacctgcggtataaccacgccgacgccgagtttcaggagcgtctgcaagaagatacgtcttttgggggcaacctcgggcgagcagtcttccaggccaagaagcgggttctcgaaccttttggtctggttgaggaaggcgctaagacggctcctggaaagaaacgtccggtagagcagtcgccacaagagccagactcctcctcgggcatcggcaagacaggccagcagcccgctaaaaagagactcaattttggtcagactggcgactcagagtcagtccccgacccacaacctctcggagaacctccagcaacccccgctgctgtgggacctactacaatggcttcaggcggtggcgcaccaatggcagacaataacgaaggcgccgacggagtgggtaatgcctcaggaaattggcattgcgattccacatggctgggcgacagagtcatcaccaccagcacccgcacctgggccttgcccacctacaataaccacctctacaagcaaatctccagtgcttcaacgggggccagcaacgacaaccactacttcggctacagcaccccctgggggtattttgatttcaacagattccactgccacttttcaccacgtgactggcagcgactcatcaacaacaattggggattccggcccaagagactcaacttcaagctcttcaacatccaagtcaaggaggtcacgacgaacgatggcgtcacgaccatcgctaataaccttaccagcacggttcaagccttctcggattcagagtaccaactgccgtacgtcctcggctctgcgcaccagggctgcctccctccgttcccggcggacgtgttcatgattccgcagtacggctacctaacgctcaacaatggcagccaggccgtgggacgttcatccttttactgcctggaatatttcccttctcagatgctgagaacgggcaacaactttaccttcagctacacctttgaggaagtgcctttccacagcagctacgcgcacagccagagcctggaccggctgatgaatcctctcatcgacccatacctgtattacctgaacagaactcaaaatcagtccggaagtgcccaaaacaaggacttgctgtttagccgtgggtctccagctggcatgtctgttcagcccaaaaactggctacctggaccctgttatcggcagcagcgcgtttctaaaacaaaaacagacaacaacaacagcaattttacctggactggtgcttcaaaatataacctcaatgggcgtgaatccatcatcaaccctggcactgctatggcctcacacaaagacgacgaagacaagttctttcccatgagcggtgtcatgatttttggaaaagagagcgccggagcttcaaatactgcattggacaatgtcatgatcacagatgaagaggaaattaaagccactaaccctgtggccaccgaaagatttgggaccgtggcagtcaatttccagagcagcagcacagaccccgcgaccggagatgtgcatgttatgggagccttacctggcatggtgtggcaagacagagacgtatacctgcagggtcccatttgggccaaaattcctcacacggatggacactttcacccgtctcctctcatgggcggctttggacttaagcacccgcctcctcaaatcctcatcaaaaacacgcctgttcctgcgaatcctccggcagagttttcggctacaaagtttgcttcattcatcacccagtactccacaggacaagtgagtgtggaaattgaatgggagctgcagaaagaaaacagcaagcgctggaatcccgaagtgcagtacacatccaattatgcaaaatctgccaacgttgatttcactgtggacaacaatggactttatactgagcctcgccccattggcacccgttacctt

SEQ ID NO: 686 - DNA, 2208 bp, synthetic construct
  misc_feature 1..2208: note = source = /note="Description of Artificial Sequence: Synthetic polynucleotide"
  source 1..2208: mol_type = other DNA
atggctgccgatggttatcttccagattggctcgaggacaacctctctgagggcattcgcgagtggtgggacttgaaacctggagccccgaaacctaaagccaaccagcaaaagcaggacgacggccggggtctggtgcttcctggctacaagtacctcggacccttcaacggactcgacaagggggagcccgtcaacgcggcggacgcagcggccctcgagcacgacaaggcctacgaccagcagctcaaagcgggtgacaatccgtacctgcggtataaccacgccgacgccgagtttcaggagcgtctgcaagaagatacgtcttttgggggcaacctcgggcgagcagtcttccaggccaagaagcgggttctcgaaccttttggtctggttgaggaaggcgctaagacggctcctggaaagaaacgtccggtagagcagtcgccacaagagccagactcctcctcgggcatcggcaagacaggccagcagcccgctaaaaagagactcaattttggtcagactggcgactcagagtcagtccccgacccacaacctctcggagaacctccagcaacccccgctgctgtgggacctactacaatggcttcaggcggtggcgcaccaatggcagacaataacgaaggcgccgacggagtgggtaatgcctcaggaaattggcattgcgattccacatggctgggcgacagagtcatcaccaccagcacccgcacctgggccttgcccacctacaataaccacctctacaagcaaatctccagtgcttcaacgggggccagcaacgacaaccactacttcggctacagcaccccctgggggtattttgatttcaacagattccactgccacttttcaccacgtgactggcagcgactcatcaacaacaattggggattccggcccaagagactcaacttcaagctcttcaacatccaagtcaaggaggtcacgacgaacgatggcgtcacgaccatcgctaataaccttaccagcacggttcaagtcttctcggattcagagtaccaactgccgtacgtcctcggctctgcgcaccagggctgcctccctccgttcccggcggacgtgttcatgattccgcagtacggctacctaacgctcaacaatggcagccaggccgtgggacgttcatccttttactgcctggaatatttcccttctcagatgctgagaacgggcaacaactttaccttcagctacacctttgaggaagtgcctttccacagcagctacgcgcacagccagagcctggaccggctgatgaatcctctcatcgaccaatacctgtattacctgaacagaactcaaaatcagtccggaagtgcccaaaacaaggacttgctgtttagccgtgggtctccagctggcatgtctgttcagcccaaaaactggctacctggaccctgttatcggcagcagcgcgtttctaaaacaaaaacagacaacaacaacagcaattttacctggactggtgcttcaaaatataacctcaatgggcgtgaatccatcatcaaccctggcactgctatggcctcacacaaagacgacgaagacaagttctttcccatgagcggtgtcatgatttttggaaaagagagcgccggagcttcaaatactgcattggacaatgtcatgatcacagatgaagaggaaattaaagccactaaccctgtggccaccgaaagatttgggaccgtggcagtcaatttccagagcagcagcacagaccccgcgaccggagatgtgcatgttatgggagccttacctggcatggtgtggcaagacagagacgtatacctgcagggtcccatttgggccaaaattcctcacacggatggacactctcacccgtctcctctcatgggcggctttggacttaagcacccgcctcctcaaatcctcatcaaaaacacgcctgttcctgcgaatcctccggcagagttttcggctacaaagtttgcttcattcatcacccagtactccacaggacaagtgagtgtggaaattgaatgggagctgcagaaagaaaacagcaagcgctggaatcccgaagtgcagtacacatccaattatgcaaaatctgccaacgttgatttcactgtggacaacaatggactttatactgagcctcgccccattggcacccgttaccttacccgtcccttg

SEQ ID NO: 687 - DNA, 2208 bp, synthetic construct
  misc_feature 1..2208: note = source = /note="Description of Artificial Sequence: Synthetic polynucleotide"
  source 1..2208: mol_type = other DNA
atggctgccgatggttatcttccagattggctcgaggacaacctctctgagggcattcgcgagtggtgggacttgaaacctggagccccgaaacctaaagccaaccagcaaaagcaggacgacggccggggtctggtgcttcctggctacaagtacctcggacccttcaacggactcgacaagggggagcccgtcaacgcggcggacgcagcggccctcgagcacgacaaggcctacgaccagcagctcaaagcgggtgacaatccgtacctgcggtataaccacgccgacgccgagtttcaggagcgtctgcaagaagatacgtcttttgggggcaacctcgggcgagcagtcttccaggccaagaagcgggttctcgaaccttttggtctggttgaggaaggcgctaagacggctcctggaaagaaacgtccggtagagcagtcgccacaagagccagactcctcctcgggcatcggcaagacaggccagcagcccgctaaaaagagactcaattttggtcagactggcgactcagagtcagtccccgacccacaacctctcggagaacctccagcaacccccgctgctgtgggacctactacaatggcttcaggcggtggcgcaccaatggcagacaataacgaaggcgccgacggagtgggtaatgcctcaggaaattggcattgcgattccacatggctgggcgacagagtcatcaccaccagcacccgcacctgggccttgcccacctacaataaccacctctacaagcaaatctccagtgcttcaacgggggccagcaacgacaaccactacttcggctacagcaccccctgggggtattttgatttcaacagattccactgccacttttcaccacgtgactggcagcgactcatcaacaacaattggggattccggcccaagagactcaacttcaagctcttcaacatccaagtcaaggaggtcacgacgaacgatggcgtcacgaccatcgctaataaccttaccagcacggttcaagtcttctcggattcagagtaccaactgccgtacgtcctcggctctgcgcaccagggctgcctccctccgttcccggcggacgtgttcatgattccgcagtacggctacctaacgctcaacaatggcagccaggccgtgggacgttcatccttttactgcctggaatatttcccttctcagatgctgagaacgggcaacaactttaccttcagctacacctttgaggaagtgcctttccacagcagctacgcgcacagccagagcctggaccggctgatgaatcctctcatcgacctatacctgtattacctgaacagaactcaaaatcagtccggaagtgcccaaaacaaggacttgctgtttagccgtgggtctccagctggcatgtctgttcagcccaaaaactggctacctggaccctgttatcggcagcagcgcgtttctaaaacaaaaacagacaacaacaacagcaattttacctggactggtgcttcaaaatataacctcaatgggcgtgaatccatcatcaaccctggcactgctatggcctcacacaaagacgacgaagacaagttctttcccatgagcggtgtcatgatttttggaaaagagagcgccggaacttcaaatactgcattggacaatgtcatgatcacagatgaagaggaaattaaagccactaaccctgtggccaccgaaagatttgggaccgtggcagtcaatttccagagcagcagcacagaccccgcgaccggagatgtgcatgttatgggagccttacctggcatggtgtggcaagacagagacgtatacctgcagggtcccatttgggccaaaattcctcacacggatggacactttcacccgtctcctctcatgggcggctttggacttaagcacccgcctcctcaaatcctcatcaaaaacacgcctgttcctgcgaatcctccggcagagttttcggctacaaagtttgcttcattcatcacccagtactccacaggacaagtgagtgtggaaattgaatgggagctgcagaaagaaaacagcaagcgctggaatcccgaagtgcagtacacatccaattatgcaaaatctgccaacgttgatttcactgtggacaacaatggactttatactgagcctcgccccattggcacccgttaccttacccgtcccttg

SEQ ID NO: 688 - DNA, 2208 bp, synthetic construct
  misc_feature 1..2208: note = source = /note="Description of Artificial Sequence: Synthetic polynucleotide"
  source 1..2208: mol_type = other DNA
atggctgccgatggttatcttccagattggctcgaggacagcctctctgagggcattcgcgagtggtgggacttgaaacctggagccccgaaacctaaagccaaccagcaaaagcaggacgacggccggggtctggtgcttcctggctacaagtacctcggacccttcaacggactcgacaagggggagcccgtcaacgcggcggacgcagcggccctcgagcacgacaaggcctacgaccagcagctcaaagcgggtgacaatccgtacctgcggtataaccacgccgacgccgagtttcaggagcgtctgcaagaagatacgtcttttgggggcaacctcgggcgagcagtcttccaggccaagaagcgggttctcgaaccttttggtctggttgaggaaggcgctaagacggctcctggaaagaaacgtccggtagagcagtcgccacaagagccagactcctcctcgggcatcggcaagacaggccagcagcccgctaaaaagagactcaattttggtcagactggcgactcagagtcagtccccgacccacaacctctcggagaacctccagcaacccccgctgctgtgggacctactacgatggcttcaggcggtggcgcaccaatggcagacaataacgaaggcgccgacggagtgggtaatgcctcaggaaattggcattgcgattccacatggctgggcgacagagtcatcaccaccagcacccgcacctgggccttgcccacctacaataaccacctctacaagcaaatctccagtgcttcaacgggggccagcaacgacaaccactacttcggctacagcaccccctgggggtattttgatttcaacagattccactgccacttttcaccacgtgactggcagcgactcatcaacaacaattggggattccggcccaagagactcaacttcaagctcttcaacatccaagtcaaggaggtcacgacgaacgatggcgtcacgaccatcgctaataaccttaccagcacggttcaagtcttctcggattcagagtaccaactgccgtacgtcctcggctctgcgcaccagggctgcctccctccgttcccggcggacgtgttcatgattccgcagtacggctacctaacgcccaacaatggcagccaggccgtgggacgttcatccttttactgcctggaatatttcccttctcagatgctgagaacgggcaacaactttaccttcagctacacctttgaggaagtgcctttccacagcagctacgcgcacagccagagcctggaccggctgatgaatcctctcatcgaccaataccagtattacctgaacagaactcaaaatcagtccggaagtgcccaaaacaaggacttgctgtttagccgtgggtctccagctggcatgtctgttcagcccaaaaactggctacctggaccctgttatcggcagcagcgcgtttctaaaacaaaaacagacaacaacaacagcaattttacctggactggtgcttcaaaatataacctcaatgggcgtgaatccatcatcaaccctggcactgctatggcctcacacaaagacgacgaagacaagttctttcccatgagcggtgtcatgatttttggaaaagagagcgccggagcttcaaatactgcattggacaatgtcatgatcacagatgaagaggaaattaaagccactaaccctgtggccaccgaaagatttgggaccgtggcagtcaatttccagagcagcagcacagaccccgcgaccggagatgtgcatgttatgggagccttacctggcatggtgtggcaagacagagacgtatacctgcagggtcccatttgggccaaaattcctcacacggatggacactttcacccgtctcctctcatgggcggctttggacttaagcacccgcctcctcaaatcctcatcaaaaacacgcctgttcctgcgaatcctccggcagagttttcggctacaaagtttgcttcattcatcacccagtactccacaggacaagtgagtgtggaaattgaatgggagctgcagaaagaaaacagcaagcgctggaatcccgaagtgcagtacacatccaattatgcaaaatctgccaacgttgatttcactgtggacaacaatggactttatactgagcctcgccccattggcacccgttaccttacccgtcccttg

SEQ ID NO: 689 - DNA, 2208 bp, synthetic construct; identical to SEQ ID NO: 680
  misc_feature 1..2208: note = source = /note="Description of Artificial Sequence: Synthetic polynucleotide"
  source 1..2208: mol_type = other DNA

SEQ ID NO: 690 - DNA, 2205 bp, synthetic construct
  misc_feature 1..2205: note = source = /note="Description of Artificial Sequence: Synthetic polynucleotide"
  source 1..2205: mol_type = other DNA
atggctgccgatggttatcttccagattggctcgaggacactctctctgaaggaataagacagtggtggaagctcaaacctggcccaccaccaccaaagcccgcagagcggcataaggacgacagcaggggtcttgtgcttcctgggtacaagtacctcggacccttcaacggactcgacaagggagagccggtcaacgaggcagacgccgcggccctcgagcacgacaaagcctacgaccggcagctcgacagcggagacaacccgtacctcaagtacaaccacgccgacgcggagtttcaggagcgccttaaagaagatacgtcttttgggggcaacctcggacgagcagtcttccaggcgaaaaagagggttcttgaacctctgggcctggttgaggaacctgttaagacggctccgggaaaaaagaggccggtagagcactctcctgtggagccagactcctcctcgggaaccggaaaggcgggccagcagcctgcaagaaaaagattgaattttggtcagactggagacgcagactcagtacctgacccccagcctctcggacagccaccagcagccccctctggtctgggaactaatacgatggctacaggcagtggcgcaccaatggcagacaataacgagggcgccgacggagtgggtaattcctcgggaaattggcattgcgattccacatggatgggcgacagagtcatcaccaccagcacccgaacctgggccctgcccacctacaacaaccacctctacaaacaaatttccagccaatcaggagcctcgaacgacaatcactactttggctacagcaccccttgggggtattttgacttcaacagattccactgccacttttcaccacgtgactggcaaagactcatcaacaacaactggggattccgacccaagagactcaacttcaagctctttaacattcaagtcaaagaggtcacgcagaatgacggtacgacgacgattgccaataaccttaccagcacggttcaggtgtttactgactcggagtaccagctcccgtacgtcctcggctcggcgcatcaaggatgcctcccgccgttcccagcagacgtcttcatggtgccacagtatggatacctcaccctgaacaacgggagtcaggcagtaggacgctcttcattttactgcctggagtactttccttctcagatgctgcgtaccggaaacaactttaccttcagctacacttttgaggacgttcctttccacagcagctacgctcacagccagagtctggaccgtctcatgaatcctctcatcgaccagtacctgtattacttgagcagaacaaacactccaagtggaaccaccacgcagtcaaggcttcagttttctcgggccggagcgagtgacattcgggaccagtctaggaactggcttcctggaccctgttaccgccagcagcgagtatcaaagacatctgcggataacaacaacagtgaatactcgtggactggagctaccaagtaccacctcaatggcagagactctctggtgaatccgggcccggccatggcaagccacaaggacgatgaagaaaagttttttcctcagagcggggttctcatctttgggaagcaaggctcagagaaaacaaatgtggacattgaaaaggtcatgattacagacgaagaggaaatcaggacaaccaatcccgtggctacggagcagtatggttctgtatctaccaacctccagagaggcaacagacaagcagctaccgcagatgtcaacacacaaggcgttcttccaggcatggtctggcaggacagagatgtgtaccttcaggggcccatctgggcaaagattccacacacggacggacattttcacccctctcccctcatgggtggattcggacttaaacaccctcctccacagattctcatcaagaacaccccggtacctgcgaatccttcgaccaccttcagtgcggcaaagtttgcttccttcatcacacagtactccacgggacaggtcagcgtggagatcgagtgggagctgcagaaggaaaacagcaaacgctggaatcccgaaattcagtacacttccaactacaacaagtctgttaatgtggactttactgtggacactaatggcgtgtattcagagcctcgccccattggcaccagatacctgactcgtaatctg

SEQ ID NO: 691 - protein, 736 aa, synthetic construct
  REGION 1..736: note = source = /note="Description of Artificial Sequence: Synthetic polypeptide"
MAADGYLPDWLEDNLSEGIREWWALKPGAPQPKANQQHQDNARGLVLPDYKYLGPGNGLDKGEPVNAADVAALEHDKAYDQQLKAGDNPYLKYNHADAEFQERLKEDTSFGGNLGRAVFQAKKRLLEPLGLVEEAAKTAPGKKRPVEQSPQEPDSSAGIGKSGAQPAKKRLNFGQTGDTESVPDPQPIGEPPAAPSGVGSLTMASGGGAPVADNNEGADGVGSSSGNWHCDSQWLGDGVITTSTRTWALPTYNNHLYKQISNSTSGGSSNDNAYFGYSTPWGYFDFNRFHCHFSPRDWQRLINNNWGFRPKRLNFKLFNIQVKEVTDNNGVKTIANNLTSTVQVFTDSDYQLPYVLGSAHEGCLPPFPADVFMIPQYGYLTLNDGSQAVGRSSFYCLEYFPSQMLRTGNNFQFSYEFENVPFHSSYAHSQSLDRLMNPLIDQYLHYLPKTINGSGQNQQTLKFSVAGPSNMAVQGRNYIPGPSYRQQRVSTTVTQNNNSEFAWPGASSWALNGRNSLMNPGPAMASYKEGEDSFFPLSGSLIFGKQGTGRDNVDADKVMITNEEEIKTTNPVATESYGQVATNHQSAQAQAQTGWVQNQGILPGMVWQDRDVYLQGPIWAKIPHTDGNFHPSPLMGGFGMKHPPPQTLIKNTPVPADPPTAFNKDKLNSFITQYSTGQVSVEIEWELQKENSKRWNPEIQYTSNYYKSNNVEFAVNTEGVYSEPRPIGTRYLTRNL

SEQ ID NO: 692 - protein, 736 aa, synthetic construct
  REGION 1..736: note = source = /note="Description of Artificial Sequence: Synthetic polypeptide"
MAADGYLPDWLEDNLSEGIREWWALKPGAPQPKANQQHQDNARGLVLPGYKYLGPGNGLDKGEPVNAADAAALEHDKAYDQQLKAGDNPYLKYNHADAEFQERLKEDTSFGGNLGRAVFQAKRRLLEPLGLVEEAAKTAPGKKRPVEQSPQEPDSSAGIGKSGAQPAKKRLNFGQTGDTESVPDPQPIGEPPAAPSGVGSLTMASGGGAPVADNNEGADGVGSSSGNWHCDSQWLGDRVITTSTRTWALPTYNNHLYKQISNSTSGGSSNDNAYFGYSTPWGYFDFNRFHCHFSPRDWQRLINNNWGFRPKRLNFKLFNIQIKEVTDNNGVKTIANNLTSTVQVFTDLDYQLPYVLGSAHEGCLPPFPADVFMIPQYGYLTLNDGSQAVGRSSFYCLEYFPSQMLRTGNNFQFSYEFENVPFHSSYAHSQSLDRLMNPLIDQYLHYLSKTINGSGQNQQTLKFSVAGPSNMAVQGRNYIPGPSYRQQRVSTTVTQNNNSEFAWPGASSWALNGRNSLMNPGPAMASYKEGEDSFFPLSGSLIFGKQGTGRDNVDADKVMITNEEEIKTTNPVATESYGQVATNHQSAQAQAQTGWVQNQGILPGMVWQDRDVYLQGPIWAKIPHTDGNFHPSPLMGGFGMKHPPPQTLIKNTPVPADPPTAFNKDKLNSFITQYSTGQVSVEIEWELQKENSKRWNPEIQYTSNYYKSNNVEFAVNTEGVYSEPRPIGTRYLTRNL

SEQ ID NO: 693 - protein, 736 aa, synthetic construct
  REGION 1..736: note = source = /note="Description of Artificial Sequence: Synthetic polypeptide"
MAADGYLPDWLEDNLSEGIREWWALKPGAPQPKANQQHQDNARGLVLPGYKYLGPGNGLDKGEPVSAADAAALEHDKAYDQQLKAGDNPYLKYNHADAEFQERLKEDTSFGGNLGRAVFQAKKRLLEPLGLVEEAAKTAPGKKRPVEQSPQEPDSSAGIGKSGAQPAKKRLNFGQTGDTESVSDPQPIGEPPAAPSGVGSLTMASGGGAPVADNNEGADGVGSSSGNWHCDSQWLGDRVITTSTRTWALPTYNNHLYKQISNSTSGGSSNDNAYFGYSTPWGYFDFNRFHCHFSPRDWQRLINNNWGFRPKRLNFKLFNIQVKEVTDNNGVKTIANNLTSTVQVFTDSDYQLPYVLGSAHEGCLPPSPADVFMIPQYGYLTLNDGSQAVGRSSFYCLEYFPSQMLRTGNNFQFSYEFENVPFHSSYAHSQSLDRLMNPLIDQYLHYLSKTINGSGQNQQTLKFSVAGPSNMAVQGRNYIPGPSYRQQRVSTTVTQNNNSEFAWPGASSWALNGRNSLMNPGPAMASYKEGEDSFFPLSGSLIFGKQGTGRDDVDADKVIITNEEEIKTTNPVATESYGQVATNHQSAQAQAQTGWVQNQGILPGMVWQDRDVYLQGPIWAKIPHTDGNFHPSPLMGGFGMKHPPPQTLIKNTPVPADPPTAFNKDKLNSFITQYSTGQVSVEIEWELQKENSKRWNPEIQYTSNYYKSNNVEFAVNTEGVYSEPRPIGTRYLTRNL

SEQ ID NO: 694 - protein, 736 aa, synthetic construct
  REGION 1..736: note = source = /note="Description of Artificial Sequence: Synthetic polypeptide"
MAADGYLPDWLEDNLSEGIREWWALKPGAPQPKANQQHQDNARGLVLPGYKYLGPGNGLDKGEPVNAADAAALEHDKAYDQQLKAGDNPYLKYNHAGAEFQERLKEDTSFGGNLGRAVFQAKKRLLEPLGLVEEAAKTAPGKKRPVEQSPQEPDSSAGIGKSGAQPAKKRLNFGQTGDTESVPDPQPIGEPPAAPSGVGSLTMASGGGAPVADNNEGAGGVGSSSGNWHCDSQWLGDRVVTTSTRTWALPTYNNHLYKQISNSTSGGSSNDNAYFGYSTPWGYFDFNRFHCHFSPRDWQRLINNNWGFRPKRLNFKLFNIQVKEVTDNNGVKTIANNLTSTVQVFTDSDYQLPYVLGSAHGGCLPPFPADVFMIPQYGYLTLNDGSQAVGRSSFYCLEYFPSQMLRTGNNFQFSYEFENVPFHSSYAHSQSLDRLMNPLIDQYLHYLSKTINGSGQNQQTLKFSVAGPSNMAVQGRSYIPGPSYRQQRVSTTVTQNNNSEFAWPGASSWALNGRNSLMNPGPAMASYKEGEDSFFPLSGSLIFGKQGTGRDNVDADKVMITNEEEIKTTNPVATESYGQVATNHQSAQAQAQTGWVQNQGILPGMVWQDRDVYLQGPIWAKIPHTDGNFHPSPLMGGFGMKHPPPQTLIKNTPVPADPPTAFNKDKLNSFITQYSTGQVSVEIEWELQKENSKRWNPEIQYTSNYYKSNNVEFAVNTEGVYSEPRPIGTRYLTRNL

SEQ ID NO: 695 - protein, 736 aa, synthetic construct
  REGION 1..736: note = source = /note="Description of Artificial Sequence: Synthetic polypeptide"
MAADGYLPDWLEDNLSEGIREWWALKPGAPQPKANQQHQDNARGLVLPGYKYLGPGNGLDKGEPVNAADAAALEHDKAYDQQLKAGDNPYLKYNHADAEFQERLKEDTSFGGNLGRAVFQAKKRLLEPLGLVEEAAKTAPGKKRPVEQSPQEPDSSAGIGKSGAQPAKKRLNFGQTGDTESVPDPQPIGEPPAAPSGVGSLTMASGGGAPVADNNEGADGVGSSSGNWHCDSQWLGDRVVTTSTRTWALPTYNNHLYKQISNSTSGGSSNDNAYFGYSTPWGYFDFNRFHCHFSPRDWQRLINNNWGFRPKRLNFKLFNIQVKEVTDNNGVKTIANNLTSTVQVFTDSDYQLPYVLGSAHEGCLPPFPADVFMIPQYGYLTLNDGSQAVGRSSFYCLEYFPSQMLRTGNNFQFSYEFENVPFHSSHAHSQSLDRLMNPLIDQYLHYLSKTINGSGQNQQTLKFSVAGHSNMAVQGRNYIPGPSYRQQRVSTTVTQNNNSEFAWPGASSWALNGRNSLMNPGPAMASYKEGEDSFFPLSGSLIFGKQGTGRDNVDADKVMITNEEEIKTTNPVATESYGQVATNHQSAQAQAQTGWVQNQGILPGMVWQDRDVYLQGPIWAKIPHTDGNFHPSPLMGGFGMKHPPPQTLIKNTPVPADPPTAFNKDKLNSFITQYSTGQVSVEIGWELQKENSKRWNPEIQYTSNYYKSNNVEFAVNTEGVYSEPRPIGTRYLTRNL

SEQ ID NO: 696 - protein, 736 aa, synthetic construct
  REGION 1..736: note = source = /note="Description of Artificial Sequence: Synthetic polypeptide"
MAADGYLPDWLEDNLSEGIREWWALKPGAPQPKANQQHQDNARGLVLPGYKYLGPGNGLDKGEPVNAADAAALEHDKAYDQQLKAGDNPYLKYNHADAEFQERLKEDTSFGGNLGRAVFQAKKRLLEPLGLVEEAAKTAPGKKRPVEQSPQEPDSSAGIGKSGAQPAKKRLNFGQTGDTESVPDPQPIGEPPAAPSGVGSLTMASGGGAPVADNNEGADGVGSSSGNWHCDSQWLGDRVITTSTRTWALPTYNNRLYKQISNSTSGGSSNDNAYFGYSTPWGYFDFNRFHCHFSPRDWQRLINNNWGFRPKRLNFKPFNIQVKEVTDNNGVKTIANNLTSTVQVFTDSDYQLPYVLGSAHEGCLPPFPADVFMIPQYGYLTLNDGSQAVGRSSFYCLEYFPSQMLRTGNNFQFSYEFENVPFHSSYAHSQSLDRLMNPLIDQYLHYLSKTINGSGQNQQTLKFSVAGPSNMAVQGRNYIPGPSYRQQRVSTTVTQNNNSEFAWPGASSWALNGRNSLMNPGPAMASYKEGEDSFFPLSGSLIFGKQGTGRDNVDADKVMITNEEEIKTTNPVATESYGQVATNHQSAQAQAQTGWVQNQGILPGMVWQDRDVYLQGPIWAKIPHTDGNFHPSPLMGGFGMKHPPPQTLIKNTPVPADPPTAFNKDKLNSFITQYSTGQVSVEIEWELQKENSKRWNPEIQYTSNYYKSNNVEFAVNTEGVYSEPRPIGTRYLTRNL

SEQ ID NO: 697 - protein, 736 aa, synthetic construct
  REGION 1..736: note = source = /note="Description of Artificial Sequence: Synthetic polypeptide"
MAADGYLPDWLEDNLSEGIREWWALKPGAPQPKANQQHQDNARGLVLPGYKYLGPGNGLDKGEPVNAADAAALEHDKAYDQQLKAGDNPYLKYNHADAEFQERLKEDTSFGGNLGRAVFQAKKRLLEPLGLVEEAAKTAPGKKRPVEQSPQEPDSSAGIGKSGAQPAKKRLNFGQTGDTESVPDPQPIGEPPAAPSGVGSLTMASGGGAPVADNNEGADGVGSSSGNWHCDSQWLGDRVITTSTRTWALPTYNNHLYKQISNSTSGGSSNDNAYFGYSTPWGYFDFNRFHCHFSPRDWQRLINNNWGFRPKRLNFKLFNIQVKEVTDNNGVKTIANNLTSTVQVFTDSDYQLPYVLGSAHEGCLPPFPADVFMIPQYGYLTLNDGSQAVGRSSFYCLEYFPSQMLRTGNNFQFSYEFENVPFHSSYAHSQSLDRLMNPLIDQYLHYLSKTINGSGQNQQTLKFSVAGPSNMAVQGRNYIPGPSYRQQRVSTTVTQNNNSEFAWPGASSWALNGRNSLMNPGPAMASYKEGEDSFFPLSGSLIFGKQGTGRDNVDADKVMITNEEEIKTTNPVATESYGQVATNHQSAQAQAQTGWVQNQGILPGMVWQDRDVYLQGPIWAKIPHTDGNFHPSPLMGGFGMKHPPPQTLIKNTPVPADPPTAFNKDKLNSFITQYSTGQVSVEIEWELQKENSKRWNPEIQYTSNYYKSNNVEFAVNTEGVYSEPRPIGTRYLTRNL

SEQ ID NO: 698 - protein, 736 aa, synthetic construct; identical to SEQ ID NO: 697
  REGION 1..736: note = source = /note="Description of Artificial Sequence: Synthetic polypeptide"

SEQ ID NO: 699 - protein, 736 aa, synthetic construct
  REGION 1..736: note = source = /note="Description of Artificial Sequence: Synthetic polypeptide"
MAADGYLPDWLEDNLSEGIREWWDLKPGAPKPKANQQKQDDGRGLVLPGYKYLGPFNGLDKGEPVNAADAAALEHDKAYDQQLKAGDNPYLRYNHADAEFQERLQEDTSFGGNLGRAVFQAKKRVLEPFGLVEEGAKTAPGKKRPVEQSPQEPDSSSGIGKSGQQPAKKRLNFGQTGDSESVPDPQPLGEPPATPAALGPTTMASGGGAPMADNNEGADGVGNASGNWHCDSTWLGDRVITTSTRTWALPTYNNHLYKQISSASTGASNDNHYFGYSTPWGYFDFNRFHCHFSPRDWQRLINNNWGFRPKRLNFKLFNIQVKEVTTNDGVTTIANNLTSTVQVFSDSEYQLPYVLGSAHQGCLPPFPADVFMIPQYGYLTLNNGSKAVGRSSFYCLEYFPSQMLRTGNNFTFSYTFEEVPFHSSYAHSQSLDRLMNPLIDQYLYYLNRTQNQSGSAQNKDLLFSRGSPAGMSVQPKNWLPGPCYRQQRVSKTKTDNNNSNFTWTGASKYNLNGRESIINPGTAMASHKDDEDKFFPMSGVMIFGKESAGASNTALDNVMITDEEEIKATNPVATERFGTVAVNFQSSSTDPATGDVHVMGALPGMVWQDRDVYLQGPIWAKIPHTDGHFHPSPLMGGFGLKHPPPQILIKNTPVPANPPAEFSATKFASFITQYSTGQVSVEIEWELQKENSKRWNPEVQYTSNYAKSANVDFTVDNNGLYTEPRPIGTRYLTRPL

SEQ ID NO: 700 - protein, 736 aa, synthetic construct
  REGION 1..736: note = source = /note="Description of Artificial Sequence: Synthetic polypeptide"
MAADGYLPDWLEDNLSEGIREWWDLKPGAPKPKANQQKQDDGRGLVLPGYKYLGPFNGLDKGEPVNAADAAALEHDKAYDQQLKAGDNPYLRYNHADAEFQERLQEDTSFGGNLGRAVFQAKKRVLEPLGLVEEGAKTAPGKKRPVEQSPQEPDSSSGIGKTGQQPAKKRLNFGQTGDSESVPDPQPLGEPPATPAAVGPTTMASGGGAPMADNNEGADGVGNASGNWHCDSTWLGDRVITTSTRTWALPTYNNHLYKQISSTSTGASNDNHYFGYSTPWGYFDFNRFHCHFSPRDWQRLINNNWGFRPKRLNFKLFNIQVKEVTTNDGVTTIANNLTSTVQVFSDSEYQLPYVLGSAHQGCLPPFPADVFMIPQYGYLTLNNGSQAVGRSSFYCLEYFPSQMLRTGNNFTFSYTFEEVPFHSSYAHSQSLDRLMNPLIDQYLYYLNRTQNQSGSAQNKDLLFSRGSPAGMSVQPKNWLPGPCYRQQRVSKTKTDNNNSNFTWTGASKYNLNGRESIINPGTAVASHKDDEDKFFPMSGVMIFGKESAGASNTALDNVMITDEEEIKATNPVATERFGTVAVNFQSSSTDPATGDVHAMGALPGMVWQDRDVYLQGPIWAKIPHTDGHFHPSPLMGGFGLKNPPPQILIKNTPVPANPPAEFSATKFASFITQYSTGQVSVEIEWELQKENSKRWNPEVQYTSNYAKSANVDFTVDNNGLYTEPRPIGTRYLTRPL

SEQ ID NO: 701 - protein, 736 aa, synthetic construct
  REGION 1..736: note = source = /note="Description of Artificial Sequence: Synthetic polypeptide"
MAADGYLPDWLEDNLSEGIREWWALKPGAPQPKANQQHQDNARGLVLPGYKYLGPGNGLDKGEPVNAADAAALEHDKAYDQQLKAGDNPYLKYNHADAEFQERLKEDTSFGGNLGRAVFQAKKRLLEPLGLVEEAAKTAPGKKRPVEQSPQEPDSSAGIGKSGAQPAKKRLNFGQTGDTESVPDPQPIGEPPAAPSGVGSLTMASGGGAPVADNNEGADGVGSSSGNWHCDSQWLGDRVITTSTRTWALPTYNNHLYKQISNSTSGGSSNDNAYFGYSTPWGYFDFNRFHCHFSPRDWQRLINNNWGFRPKRLNFKLFNIQVKEVTDNNGVKTIANNLTSTVQVFTDSDYQLPYVLGSAHEGCLPPFPADVFMIPQYGYLTLNDGSQAVGRSSFYCLEYFPSQMLRTGNNFQFGYEFENVPFHSSYAHSQSLDRLMNPLIDQYLYYLSKTINGSGQNQQTLKFSVAGPSNMAVQGRNYIPGPSYRQQRVSTTVTQNNNSEFAWPGASSWALNGRNSLMNPGPAMASHKEGEDRFFPLSGSLIFGKQGTGRDNVDADKVMITNEEEIKTTNPVATESYGQVATNHQSAQAQAQTGWVQNQGILPGMVWQDRDVYLQGPIWAKIPHTDGNFHPSPLMGGFGMKHPPPQILIKNTPVPADPPTAFNKDKLNSFITQYSTGQVSVEIEWELQKENSKRWDPEIQYTSNYYKSNNVEFAVNTEGVYSEPRPIGTRYLTRNL

SEQ ID NO: 702 - protein, 736 aa, synthetic construct
  REGION 1..736: note = source = /note="Description of Artificial Sequence: Synthetic polypeptide"
MAADGYLPDWLEDNLSEGIREWWALKPGAPQPKANQQHQDNARGLVLPGYKYLGPGNGLDKGEPVNAADAAALEHDKAYDQQLKAGDNPYLKYNHADAEFQERLKEDTSFGGNLGRAVFQAKKRLLEPLGLVEEAAKTAPGKKRPVEQSPQEPDSSAGIGKSGAQPAKKRLNFGQTGDTESVPDPQPIGEPPAAPSGVGSLTMASGGGAPVADNNEGADGVGSSSGNWHCDSQWLGDRVITTSTRTWALPTYNNHLYKQISNSTSGGSSNDNAYFGYSTPWGYFDFNRFHCRFSPRDWQRLINNNWGFRPKRLNFKLFNIQVKEVTDNNGVKTIANNLTSTVQVFTDSDYQLPYVLGSAHEGCLPPFPADVFMIPQYGYLTLNDGSQAVGRSSFYCLEYFPSQMLRTGNNFQFSYEFENVPFHSSYAHSQSLDRLMNPLIDQYLYYLSKTINGSGQNQQTLKFSVAGPSNMAVQGRNYIPGPSYRQQRVSTTVTQNNNSEFAWPGASSWALNGRNSLMNPGPAMASHKEGEDRFFPLSGSLIFGKQGTGRDNVDADKVMITNEEEIKTTNPVATESYGQVATNHQSAQAQAQTGWVQNQGILPGMVWQDRDVYLQGPIWAKIPHTDGNFHPSPLMGGFGMKHPPPQILIKNAPVPADPPTAFNKDKLNSFITQYSTGQVSVEIEWELQKENSKRWNPEIQYTSNYYKSNNVEFAVNTEGVYSEPRPIGTRYLTRNL

SEQ ID NO: 703 - protein, 736 aa, synthetic construct
  REGION 1..736: note = source = /note="Description of Artificial Sequence: Synthetic polypeptide"
MAADGYLPDWLEDNLSEGIREWWALKPGAPQPKANQQHQDNARGLVLPGYKYLGPGNGLDKGEPVSAADAAALEHDKAYDQQLKAGDNPYLKYNHADAEFQERLKEDTSFGGNLGRAVFQAKKRLLEPLGLVEEAAKTAPGKKRPVEQSPQEPDSSAGIGKSGAQPAKKRLNFGQTGDTESVPDPQPIGEPPAAPSGVGSLTMASGGGAPVADNNEGADGVGSSSGNWHCDSQWLGDRVITTSTRTWALPTYNNHLYKQISNSTSGGSSNDNAYFGYSTPWGYFDFNRFHCHFSPRDWQRLINNNWGFRPKRLNFKLFNIQVKEVTDNNGVKTIANNLTSTVQVFTDSDYQLPYVLGSAHEGCLPPFPADVFMIPQYGYLTLNDGSQAVGRSSFYCLEYFPSQMLRTGNNFQFSYEFENVPFHSSYAHSQSLDRLMNPLIDQYLYYLSKTINGSGQNQQTLKFSVAGPSNMAVQGRNYIPGPSYRQQRVSTTVTQNNNSEFAWPGASSWALNGRNSLMNPGPAMASHKEGEDRFFPLSGSLIFGKQGTGRDNVDADKVMITNEEEIKTTNPVATESYGQVATNHQSAQAQAQTGWVQNQGILPGMVWQDRDVYLQGPIWAKIPHTDGNFHPSPLMGGFGMKHPPPQILIKNTPVPADPPTAFNKDKLNSFITQYSTGQVSVEIEWELQKENSKRWNPEIQYTSNYYKSNNVEFAVNTEGVYSEPRPIGTRYLTRNL

SEQ ID NO: 704 - protein, 736 aa, synthetic construct
  REGION 1..736: note = source = /note="Description of Artificial Sequence: Synthetic polypeptide"
MAADGYLPDWLEDNLSEGIREWWALKPGAPQPKANQQHQDNARGLVLPGYKYLGPGNGLDKGEPVNAADAAALEHDKAYDQQLKAGDNPYLKYNHADAEFQERLKEDTSFGGNLGRAVFQAKKRLLEPLGLVEEAAKTAPGKKRPVEQSPQEPDSSAGIGKSGAQPAKKRLNFGQTGDTESVPDPQPIGEPPAAPSGVGSLTMASGGGAPVADNNEGADGVGSSSGNWHCDSQWLGDRVITTSTRTWALPTYNNHLYKQISNSTSGGSSNDNAYFGYSTPWGYFDFNRFHCHFSPRDWQRLINNNWGFRPKRLNFKLFNIQVKEVTDNNGVKTIANNLTSTVQVFTDSDYQLPYVLGSAHEGCLPPFPADVFMIPQYGYLTLNDGSQAVGRSSFYCLEYFPSQMLRTGNNFQFSYEFENVPFHSSYAHSQSLDRLMNPLIDQYLYYLSKTINGSGQNQQTLKFSVAGPSNTAVQGRNYIPGPSYRQQRVSTTVTQNNNSEFAWPGASSWALNGRNSLMNPGPAMASHKEGEDRFFPLSGSLIFGKQGTGRDNVDADKVMITNEEEIKTTNPVATESYGQVATNHQSAQAQAQTGWVQNQGILPGMVWQDRDVYLQGPIWAKIPHTDGNFHPSPLMGGFGMKHPPPQILIKNTPVPADPPTAFNKDKLNSFITQYSTGQVSVEIEWELQKENSKRWNPEIQYTSNYYKSNNVEFAVNTEGVYSEPRPIGTRYLTRNL

SEQ ID NO: 705 - protein, 736 aa, synthetic construct
  REGION 1..736: note = source = /note="Description of Artificial Sequence: Synthetic polypeptide"
MAADGYLPDWLEDNLSEGIREWWALKPGAPQPKANQQHQDNARGLVLPGYKYLGPGNGLDKGEPVNAADAAALEHDKAYDQQLKAGDNPYLKYNHADAEFQERLKEDTSFGGNLGRAVFQAKKRLLEPLGLVEEAAKTAPGKKRPVEQSPQEPDSSAGIGKSGAQPAKKRLNFGQTGDTESVPDPQPIGEPPAAPSGVGSLTMASGGGAPVADNNEGADGVGSSSGNWHCDSQWLGDRVITTSTRTWALPTYNNHLYKQISNSTSGGSSNDNAYFGYSTPWGYFDFNRFHCHFSPRDWQRLINNNWGFRPKRLNFKLFNIQVKEVTDNNGVKTIANNLTSTVQVFTDSDYQLPYVLGSAHEGCLPPFPADVFMIPQYGYLTLNDGSQAVGRSSFYCLEYFPSQMLRTGSNFQFSYEFENVPFHSSYAHSQSLDRLMNPLIDQYLYYLSKTINGSGQNQQTLKFSVAGPSNMAVQGRNYIPGPSYRQQRVSTTVTQNNNSEFAWPGASSWALNGRNSLMNPGPAMASHKEGEDRFFPLSGSLIFGKQGTGRDNVDADKVMITNEEEIKTTNPAATESYGQVATNHQSAQAQAQTGWVQNQGILPGMVWQDRDVYLQGPIWAKIPHTDGNFHPSPLMGGFGMKHPPPQILIKNTPVPADPPTAFNKDKLNSFITQYSTGQVSVEIEWELQKENSKRWNPEIQHTSNYYKSNNVEFAVNTEGVYSEPRPIGTRYLTRNL

SEQ ID NO: 706 - protein, 736 aa, synthetic construct
  REGION 1..736: note = source = /note="Description of Artificial Sequence: Synthetic polypeptide"
MAADGYLPDWLEDNLSEGIREWWALKPGAPQPKANQQHQDNARGLVLPGYKYLGPGNGLDKGEPVNAADAAALEHDKAYDQQLKAGDNPYLKYNHADAEFQERLKEDTSFGGNLGRAVFQAKKRLLEPLGLVEEAAKTAPGKKRPVEQSPQEPDSSAGIGKSGAQPAKKRLNFGQTGDTESVPDPQPIGEPPAAPSGVGSLTMASGGGAPVADNNEGADGVGSSSGNWHCDSQWLGDRVITTSTRTWALPTYNNHLYKQISNSTSGGSSNDNAYFGYSTPWGYFDFNRFHCHFSPRDWQRLINNNWGFRPKRLNFRLFNIQVKEVTDNNGVKTIANNLTSTVQVFTDSDYQLPYVLGSAHEGCLPPFPADVFMIPQYGYLTLNDGSQAVGRSSFYCLEYFPSQMLRTGNNFQFSYEFENVPFHSSYAHSQSLDRLMNPLIDQYLYYLSKTINGSGQNQQTLKFSVAGPSNMAVQGRNYIPGPSYRQQRVSTTVTQNNNSEFAWPGASSWALNGRNSLMNPGPAMASHKEGEDRFFPLSGSLIFGKQGTGRDNVDADKVMITNEEEIKTTNPVATESYGQVATNHQSAQAQAQTGWVQSQGILPGMVWQDRDVYLQGPIWAKIPHTDGNFHPSPLMGGFGMKHPPPQILIKNTPVPADPPTAFNKDKLNSFITQYSTGQVSVEIEWELQKENSKRWNPEIQYTSNYYKSNNVEFAVNTEGVYSEPRPIGTRYLTRNL

SEQ ID NO: 707 - protein, 735 aa, synthetic construct
  REGION 1..735: note = source = /note="Description of Artificial Sequence: Synthetic polypeptide"
MAADGYLPDWLEDNLSEGIREWWALKPGAPQPKANQQHQDNARGLVLPGYKYLGPGNGLDKGEPVNAADAAALEHDKAYDQQLKAGDNPYLKYNHADAEFQERLKEDTSFGGNLGRAVFQAKKRLLEPLGLVEEAAKTAPGKKRPVEQSPQEPDSSAGIGKSGAQPAKKRLNFGQTGDTESVPDPQPIGEPPAAPSGVGSLTMASGGGAPVADNNEGADGVGSSSGNWHCDSQWLGDRVITTSTRTWALPTYNNHLYKQISNSTSGGSSNDNAYFGYSTPWRYFDFNRFHCHFSPRDWQRLINNWGFRPKRLNFKLFNIQVKEVTDNNGVKTIANNLTSTVQAFTDSDYQLPYVLGSAHEGCLPPFPADVFMIPQYGYLTLNDGSQAVGRSSFYCLEYFPSQMLRTGNNFQFSYEFENVPFHSSYAHSQSLDRLMNPLIDQYLYYLSKTINGSGQNQQTLKFSVAGPSNMAVQGRNYIPGPSYRQQRVSTTVTQNNNSEFAWPGASSWALNGRNSLMNPGPAMASHKEGEDRFFPLSGSLIFGKQGTGRDNVDADKVMITNEEEIKTTNPVATESYGQVATNHQSAQAQAQTGWVQNQGILPGMVWQDRDVYLQGPIWAKIPHTDGNFHPSPLMGGFGMKHPPPQILIKNTPVPADPPTAFNKDELNSFITQYSTGQVSVEIEWELQKENSKRWNPEIQYTSNYYKSNNVEFAVNTEGVYSEPRPIGTRYLTRNL

SEQ ID NO: 708 - protein, 735 aa, synthetic construct
  REGION 1..735: note = source = /note="Description of Artificial Sequence: Synthetic polypeptide"
MAADGYLPDWLEDNLSEGIREWWALKPGAPQPKANQQHQDNARGLVLPGYKYLGPGNGLDKGEPVNAADAAALEHDKAYDQQLKAGDNPYLKYNHADAEFQERLKEDTSFGGNLGRAVFQDKKRLLEPLGLVEEAAKTAPGKKRPVEQSPQEPDSSAGIGKSGAQPAKKRLNFGQTGDTESVPDPQPIGEPPAAPSGVGSLTMASGGGAPVADNNEGADGVGSSSGNWHCDSQWLGDRVITTSTRTWALPTYNNHLYKQISNSTSGGSSNDNAYFGYSTPWGYFDFNRFHCHFSPRDWQRLINNWGFRPKRLNFKLFNIQVKEVTDNNGVKTIANNLTSTVQVFTDSDYQLPYVLGSAHEGCLPPFPADVFMIPQYGYLTLNDGSQAVGRSSFYCLEYFPSQMLRTGNNFQFSYEFENVPFHSSYAHSQSLDRLMNPLIDQYLYYLSKTINGSGQNQQTLKFSVAGPSNMAVQGRNYIPGPSYRQQRVSTTVTQNNNSEFAWPGASSWALNGRNSLMNPGPAMASHKEGEDRFFPLSGSLIFGKQGTGRDNVDADKVMITNEEEIKTTNPVATESYGQVATNHQSAQAQAQTGWVQNQGILPGMVWQDRDVYLQGPIWAKIPHTDGNFHPSPLMGGFGMKHPPPQILIKNTPVPADPPTAFNKDKLNSFITQYSTGQVSVEIEWELQKENSKRWNPEIQYTSNYYKSNNVEFAVNTEGVYSEPRPIGTRYLTRNL

SEQ ID NO: 709 - protein, 736 aa, synthetic construct
  REGION 1..736: note = source = /note="Description of Artificial Sequence: Synthetic polypeptide"
MAADGYLPDWLEDNLSEGIREWWALKPGAPQPKANQQHQDNARGLVLPGYKYLGPGNGLDKGEPVNAADAAALEHDKAYDQQLKAGDNPYLKYNHADAEFQERLKEDTSFGGNLGRAVFQAKKRLLEPLGLVEEAAKTAPGKKRPVEQSPQEPDSSAGIGKSGAQPAKKRLNFGQTGDTESVPDPQPIGEPPAAPSGVGSLTMASGGGAPVADNNEGADGVGSSSGNWHCDSQWLGDRAITTSTRTWALPTYNNHLYKQISNSTSGGSSNDNAYFGYSTPWGYFDFNRFHCHFSPRDWQRLINNNWGFRPKRLNFKLFNIQVKEVTDNNGVKTIANNLTSTVQVFTDSDYQLPYVLGSAHEGCLPPFPADVFMIPQYGYLTLNDGSQAVGRSSFYCLEYFPSQMLRTGNNFQFSYEFENVPFHSSYAHSQSLDRLMNPLIDQYLYYLSKTINGSGQNQQTLKFSVAGPSNMAVQGRNYIPGPSYRQQRVSTTVTQNNNSEFAWPGASSWALNGRNSLMNPGPAMASHKEGEDRFFPLSGSLIFGKQGTGRDNVDADKVMTTNEEEIKTTNPVATESYGQVATNHQSAQAQAQTGWVQNQGILPGMVWQDRDVYLQGPIWAKIPHTDGNFHPSPLMGGFGMKHPPPQILIKNTPVPADPPTAFNKDKLNSFITQYSTGQVSVEIEWELQKENSKRWNPEIQYTSNYYKSNNVEFAVNTEGVYSEPRPIGTRYLTRNL

SEQ ID NO: 710 - protein, 736 aa, synthetic construct
  REGION 1..736: note = source = /note="Description of Artificial Sequence: Synthetic polypeptide"
MAADGYLPDWLEDNLSEGIREWWALKPGAPQPKANQQHQDNARGLVLPGYKYLGPGNGLDKGEPVNAADAAALEHDKAYDQQLKAGDNPYLKYNHADAEFQERLKEDTSFGGNLGRAVFQTKKRLLEPLGLVEEAAKTAPGKKRPVEQSPQEPGSSAGIGKSGAQPAKKRLNFGQTGDTESVPDPQPIGEPPAAPSGVGSLTMASGGGAPVADNNEGADGVGSSSGNWHCDSQWLGDRVITTSTRTWALPTYNNHLYKQISNSTSGGSSNDNAYFGYSTPWGYFDFNRFHCHFSPRDWQRLINNNWGFRPKRLNFKLFNIQVKEVTDNNGVKTIANNLTSTVQVFTDSDYQLPYVLGSAHEGCLPPFPADVFMIPQYGYLTLNDGSQAVGRSSFYCLEYFPSQMLRTGNNFQFSYEFENVPFHSSYAHSQSLDRLMNPLIDQYLHYLSKTINGSGQNQQTLKFSVAGPSNMAVQGRNYIPGPSYRQQRVSTTVTQNNNSEFAWPGASSWALNGRNSLMNPGPAMASHKEGEDRFFPLSGSLIFGKQGTGRDNVDADKVMITNEEEIKTTNPVATESYGQVATNHQSAQAQAQTGWVQNQGILPGMVWQDRDVYLQGPIWAKIPHTDGNFHPSPLMGGFGMKHPPPQILIKNTPVPADPPTAFNKDKLNSFITQYSTGQVSVEIEWELQKENSKRWNPEIQYTSNYYKSNNVEFAVNTEGVYSEPRPIGTRYLTRNL

SEQ ID NO: 711 - protein, 736 aa, synthetic construct
  REGION 1..736: note = source = /note="Description of Artificial Sequence: Synthetic polypeptide"
MAADGYFPDWLEDNLSEGIREWWALKPGAPQPKANQQHQDNARGLVLPGYKYLGPGNGLDKGEPVNAADAAALEHDKAYDQQLKAGDNPYLKYNHADAEFQERLKEDTSFGGNLGRAVFQAKKRLLEPLGLVEEAAKTAPGKKRPVEQSPQEPDSSAGIGKSGAQPAKKRLNFGQTGDTESVPDPQPIGESPAAPSGVGSLTMASGGGAPVADNNEGADGVGSSSGNWHCDSQWLGDRVITTSTRTWALPTYNNHLYKQISNSTSGGSSNDNAYFGYSTPWGYFDFNRFHCHFSPRDWQRLINNNWGFRPKRLNFKLFNIQVKEVTDNNGVKTIANNLTSTVQVFTDSDYQLPYVLGSAHEGCLPPFPADVFMIPQYGYLTLNDGSQAVGRSSFYCLEYLPSQMLRTGNNFQFSYEFENVPFHSSYAHSQSLDRLMNPLIDQYLHYLSKTINGSGQNQQTLKFSVAGPSNMAVQGRNYIPGPSYRQQRVSTTVTQNNNSEFAWPGASSWALNGRNSLMNPGPAVASHKEGEDRFFPLSGSLIFGKQGTGRDNVDADKVMITNEEEIKTTNPVATESYGQVATNHQSAQAQAQTGWVQNQGILPGMVWQDRDVYLQGPIWAKIPHTDGNFHPSPLMGGFGMKHPPPQILIKNTPVPADPPTAFNKDKLNSFITQYSTGQVSVEIEWELQKENSKRWNPEIQYTSNYYKSNNVEFAVNTEGVYSEPRPIGTRYLTRNL

SEQ ID NO: 712 - protein, 736 aa, synthetic construct
  REGION 1..736: note = source = /note="Description of Artificial Sequence: Synthetic polypeptide"
MAADGYLPDWLEDNLSEGIREWWALKPGAPQPKANQQHQDNARGLVLPGYKYLGPGNGLDKGEPVNAADAAALEHDKAYDQQLKAGDNPYLKYNHADAEFQERLKEDTSFGGNLGRAVFQAKKRLLEPLGPVEEAAKTAPGKKRPVEQSPQEPDSSAGIGKSGAQPAKKRLNFGQTGDTESVPDPQPIGEPPAAPSGVGSLTMASGGGAPVADNNEGADGVGSSSGNWHCDSQWLGDRVITTSTRTWALPTYNNHLYKQISNSTSGGSSNDNAYFGYSTPWGYFDFNRFHCHFSPRDWQRLINNNWGFRPKRLNFKLFNIQVKEVTDNNGVKTIANNLTSTVQVFTDSDYQLPYVLGSAHEGCLPPFPADVFMIPQYGYLTLNDGSQAVGRSSFYCLEYFPSQMLRTGNNFQFSYEFENVPFHSSYAHSQSLDRLMNPLIDQYLYYLSKTINGSGQNQQTLKFSVAGPSNMAVQGRNYIPGPSYRQQRVSTTVTQNNNSEFAWPGASSWALNGRNSLMNPGPAMASHKEGEDRFFPLSGSLIFGKQGTGRDNVDADKVMITNEEEIKTTNPVATESYGQAATNHQSAQAQAQTGWVQNQGILPGMVWQDRDVYLQGPIWAKIPHTDGNFHPSPLMGGFGMKHPPPQILIKNTPVPADPPTAFNKDKLNSFITQYSTGQVSVEIEWELQKENSKRWNPEIQYTSNYYKSNNVEFAVNTEGVYSEPRPIGTRYLTRNL

SEQ ID NO: 713 - protein, 736 aa, synthetic construct
  REGION 1..736: note = source = /note="Description of Artificial Sequence: Synthetic polypeptide"
MAADGYLPDWLEDNLSEGIREWWALKPGAPQPKANQQHQDNARGLVLPGYKYLGPGNGLDKGEPVNAADAAALEHDKAYDQQLKAGDNPYLKYNHADAEFQERLKEDTSFGGNLGRAVFQAKKRLLEPLGPVEEAAKTAPGKKRPVEQSPQEPDSSAGIGKSGAQPAKKRLNFGQTGDTESVPDPQPIGEPPAAPSGVGSLTMASGGGAPVADNNEGADGVGSSSGNWHCDSQWLGDRVITTSTRTWALPTYNNHLYKQISNSTSGGSSNDNAYFGYSTPWGYFDFNRFHCHFSPRDWRRLINNNWGFRPKRLNFKLFNIQVKEVTDNNGVKTIANNLTSTVQVFTDSDYQLPYVLGSAHEGCLPPFPADVFMIPQYGYLTLNDGSQAVGRSSFYCLEYFPSQMLRTGNNFQFSYEFENVPFHSSYAHSQSLDRLMNPLIDQYLYYLSKTINGSGQNQQTLKFSVAGPSNMAVQGRNYIPGPSYRQQRVSTTVTQNNNSEFAWPGASSWALNGRNSLMNPGPAMASHKEGEDRFFPLSGSLIFGKQGTGRDNVDADKVMITNEEEIKTTNPVATESYGQVATNHQSAQAQAQTGWVQNQGILPGMVWQDRDVYLQGPIWAKIPHTDGNFHPSPLMGGFGMKHPPPQILIKNTPVPADPPTAFNKDKLNSFITQYSTGQVSVEIEWELQKENSKRWNPEIQYTSNYYKSNNVEFAVNTEGVYSEPRPIGTRYLTRNL

SEQ ID NO: 714 - protein, 736 aa, synthetic construct
  REGION 1..736: note = source = /note="Description of Artificial Sequence: Synthetic polypeptide"
MAADGYLPDWLEDNLSEGIREWWALKPGAPQPKANQQHQDNARGLVLPGYKYLGPGNGLDKGEPVNAADAAALEHDKAYDQQLKAGDNLYLKYNHADAEFQERLKEDTSFGGNLGRAVFQAKKRLLEPLGLVEEAAKTAPGKKRPVEQSPQEPDSSAGIGKSGAQPAKKRLNFGQTGDTESVPDPQPIGEPPAAPSGVGSLTMASGGGAPVADNNEGADGVGSSSGNWHCDSQWLGDRVITTSTRTWALPTYNNHLYKQISNSTSGGSSNDNAYFGYSTPWGYFDFNRFHCHFSPRDWQRLINNNWGFRPKRLNFKLFNIQVKEVTDNNGVKTIANNLTSTVQVFTDSDYQLPYVLGSAHEGCLPPFPADVFMIPQYGYLTLNDGSQAVGRSSFYCLEYFPSQMLRTGNNFQFSYEFENVPFHSSYAHSQSLDRLMNPLIDQYLHYLSKTINGSGQNQQTLKFSVAGPSNMAVQGRNYIPGPSYRQQRVSTTVTQNNNSEFAWPGASSWALNGRNSLMNPGPAMASHKEGEDRFFPLSGSLIFGKQGTGRDNVDADKVMITNEEEIKTTNPVATESYGQVATNHQSAQAQAQTGWVQNQGILPGMVWQDRDVYLQGPIWAKIPHTDGNFHPSPLMGGFGMKHPPPQILIKNTPVPADPPTAFNKDKLNSFITQYSTGQVSVEIEWELQKENSKRWNPEIQYTSNYYKSNNVEFAVNTEGVYSEPRPIGTRYLTRNL

SEQ ID NO: 715 - protein, 736 aa, synthetic construct
  REGION 1..736: note = source = /note="Description of Artificial Sequence: Synthetic polypeptide"
MAADGYLPDWLEDNLSEGIREWWALKPGAPQPKANQQHQDNARGLVLPGYKYLGPGNGLDKGEPVNAADAAALEHDKAYDQQLKAGDNPYLKYNHADAEFQERLKEDTSFGGNLGRAVFQAKKRLLEPLGLVEEAAKTAPGKKRPVEQSPQEPDSSAGIGKSGAQPAKKRLNFGQTGDTESVPDPQPIGEPPAAPSGVGSLTMASGGGAPVADNNEGADGVGSSSGNWHCDSQWLGDRVITTSTRTWALPTYNNHLYKQISNSTSGGSSNDNAYFGYSTPWGYFDFNRFHCHFSPRDWQRLINNNWGFRPKRLNFKLFNIQVKEVTDNNGVKTIANNLTSTVQVFTDSDYQLPYVLGSAHEGCLPPFPADVFMIPQYGYLTLNDGSQAVGRSSFYCLEYFPSQMLRTGNNFQFSYEFENVPFHSSYAHSQSLDRLMNPLIDQYLHYLSKTINGSGQNQQTLKFSVAGPSNMAVQGRNYIPGPSYRQQRVSTTVTQNNNSEFAWPGASSWALNGRNSLMNPGPAMASHKEGEDRFFPLSGSLIFGKQGTGRDNVDADKVMITNEEEIKTTNPVATESYGQVATNHQSAQAQAQTGWVQNQGILPGMVWQDRDVYLQGPIWAKIPHTDGNFHPSPLMGGFGMKHPPPQILIKNTPVPADPPTAFNKDKLNSFITQYSTGQVSVEIEWELQKENSKRWNPEIQYTSNYYKSNNVEFAVNTEGVYSEPRPIGTRYLTRNL

SEQ ID NO: 716 - protein, 736 aa, synthetic construct
  VARIANT 442: note = MOD_RES - Any naturally occurring amino acid
  REGION 1..736: note = source = /note="Description of Artificial Sequence: Synthetic polypeptide"
MAADGYLPDWLEDNLSEGIREWWALKPGAPQPKANQQHQDNARGLVLPGYKYLGPGNGLDKGEPVNAADAAALEHDKAYDQQLKAGDNPYLKYNHADAEFQERLKEDTSFGGNLGRAVFQAKKRLLEPLGLVEEAAKTAPGKKRPVEQSPQEPDSSAGIGKSGAQPAKKRLNFGQTGDTESVPDPQPIGEPPAAPSGVGSLTMASGGGAPVADNNEGADGVGSSSGNWHCDSQWLGDRVITTSTRTWALPTYNNHLYKQISTSTSGGSSNDNAYFGYSTPWGYFDFNRFHCHFSPRDWQRLINNNWGFRPKRLNFKLFNIQVKEVTDNNGVKTIANNLTSTVQVFTDSDYQLPYVLGSAHEGCLPPFPADVFMIPQYGYLTLNDGSQAVGRSSFYCLEYFPSQMLRTGNNFQFSYEFENVPFHSSYAHSQSLDRLMNPLIDXYLHYLSKTINGSGQNQQTLKFSVAGPSNMAVQGRNYIPGPSYRQQRVSTTVTQNNNSEFAWPGASSWALNGRNSLMNPGPAMASHKEGEDRFFPLSGSLIFGKQGTGRDNVDADKVMITNEEEIKTTNPVATESYGQVATNHQSAQAQAQTGWVQNQGILPDMVWQDRDVYLQGPIWAKIPHTDGNFHPSPLMGGFGMKHPPPQILIKNTPVPADPPTAFNKDKLNSFITQYSTGQVSVEIEWELQKENSKRWNPEIQYTSNYYKSNNVEFAVNTEGVYSEPRPIGTRYLTRNL

SEQ ID NO: 717 - protein, 736 aa, synthetic construct; identical to SEQ ID NO: 697
  REGION 1..736: note = source = /note="Description of Artificial Sequence: Synthetic polypeptide"

SEQ ID NO: 718 - protein, 736 aa, synthetic construct; identical to SEQ ID NO: 701
  REGION 1..736: note = source = /note="Description of Artificial Sequence: Synthetic polypeptide"

SEQ ID NO: 719 - protein, 736 aa, synthetic construct
  REGION 1..736: note = source = /note="Description of Artificial Sequence: Synthetic polypeptide"
MAADGYLPDWLEDNLSEGIREWWALKPGAPQPRANQQHQDNARGLVLPGYKYLGPGNGLDKGEPVNAADAAALEHDKAYDQQLKAGDNPYLKYNHADAEFQERLKEDTSFGGNLGRAVFQAKKRLLEPLGLVEEAAKTAPGKKRPVEQSPQEPDSSAGIGKSGAQPAKKRLNFGQTGDTESVPDPQPIGEPPAAPSGVGSLTMASGGGAPVADNNEGADGVGSSSGNWHCDSQWLGDRVITTSTRTWALPTYNNHLYKQISNSTSGGSSNDNAYFGYSTPWGYFDFNRFHCHFSPRDWQRLINNNWGFRPKRLNFKLFNIQVKEVTDNNGVKTIANNLTSTVQVFTDSDCQLPYVLGSAHEGCLPPFPADVFMIPQYGYLTLNDGSQAVGRSSFYCLEYFPSQMLRTGNNFQFSYEFENVPFHSSYAHSQSLDRLTNPLIDQYLYYLSKTINGSGQNQQTLKFSVAGPSNMAVQGRNYIPGPSYRQQRVSTTVTQNNNSEFAWPGASSWALNGRNSLMNPGPAMASHKEGEDRFFPLSGSLIFGKQGTGRDNVDADKVMITNEEEIKTTNPVATESHGQVATNHQSAQAQAQTGWVQNQGILPGMVWQDRDVYLQGPIWAKIPHTDGNFHPSPLMGGFGMKHPPPQILIKNTPVPADPPTAFNKDKLNSFITQYSTGQVSVEIEWELQKENSKRWNPEIQYTSNYYKSNNVEFAVNTEGVYSEPRPIGTRYLTRNL

SEQ ID NO: 720 - protein, 736 aa, synthetic construct
  REGION 1..736: note = source = /note="Description of Artificial Sequence: Synthetic polypeptide"
MAADGYLPDWLEDNLSEGIREWWALKPGAPQPKANQQHQDNARGLVLPGYKYLGPGNGLDKGEPVNAADAAALEHDKAYDQQLKAGDNPYLKYNHADAEFQERLKEDTSFGGNLGRAVFQAKKRLLEPLGLVEEAAKTAPGKKRPVEQSPQEPDSSAGIGKSGAQPAKKRLNFGQTGDTESVPDPQPIGEPPAAPSGVGSLTMASGGGAPVADNNEGADGVGSSSGNWHCDSQWLGDRVITTSTRTWALPTYNNHLYKQISNSTSGGSSNDNAYFGYSTPWGYFDFNRFHCHFSPRDWQRLINNNWGFRPKRLNFKLFNIQVKEVTDNNGVKTIANNLTSTVQVFTDSDYQLPYVLGSAHEGCLPPFPADVFMIPQYGYLTLNDGSQAVGRSSFYCLEYFPSQMLRTGNNFQFSYEFENVPFHSSYAHSQSLDRLMNPPIDQYLYYLSKTINGSGQNQQTLKFSVAGPSNMAVQGRNYIPGPSYRQQRVSTTVTQNNNSEFAWPGASSWALNGRNSLMNPGPAMASHKEGEDRFFPLSGSLIFGKQGTGRDNVDADKVMITNEEEIKTTNPVATESYGQVATNHQSAQAQAQTGWVQNQGILPGMVWQDRDVYLQGPIWAKIPHTDGNFHPSPLMGGFGMKHPPPQILIKNTPVPADPPTAFNKDKLNSFITQYSTGQVSVEIEWELQKENSKRWNPEIQYTSNYYKSNNVEFAVNTEGVYGEPRPIGTRYLTRNL

SEQ ID NO: 721 - protein, 736 aa, synthetic construct
  REGION 1..736: note = source = /note="Description of Artificial Sequence: Synthetic polypeptide"
MAADGYLPDWLEDNLSEGIREWWALKPGAPQPKANQQHQDNARGLVLPGYKYLGPGNGLDKGEPVNAADAAALEHDKAYDQQLKAGDNPYLKYNHADAEFQERLKEDTSFGGNLGRAVFQAKKRLLEPLGLVEEAAKTAPGKKRPVEQSPQEPDSSAGIGKSGAQPAKKRLNFGQTGDTESVPDPQPIGEPPAAPSGVGSLTMASGGGAPVADNNEGADGVGSSSGNWHCDSQWLGDRVITTSTRTWALPTYNNHLYKQISNSTSGGSSNDNAYFGYSTPWGYFDFNRFHCHFSPRDRQRLINNNWGFRPKRLNFKLFNIQVKEVTDNNGVKTIANNLTSTVQVFTDSDYQLPYVLGSAHEGCLPPFPADVFMIPQYGYLTLNDGSQAVGRSSFYCLEYFPSQMLRTGNNFQFSYEFENVPFHSSYAHSQSLDRLMNPLIDQYLYYLSKTINGSGQNQQTLKFSVAGPSNMAVQGRNYIPGPSYRQQRVSTTVTQNNNSEFAWPGASSWALNGRNSLMNPGPAMASHKEGEDRFFPLSGSLIFGKQGTGRDNVDADKVMITNEEEIKTTNPVATESYGQVATNHQSAQAQAQTGWVQNQGILPGMVWQDRDVYLQGPIWAKIPHTDGNFHPSPLMGGFGMKHPPPQILIKNTPVPADPPTAFNKDKLNSFITQYSTGQVSVEIEWELQKENSKRWNPEIQYTSNYYKSNNVEFAVNTEGVYSEPRPIGTRYLTRNL

SEQ ID NO: 722 - protein, 736 aa, synthetic construct
  REGION 1..736: note = source = /note="Description of Artificial Sequence: Synthetic polypeptide"
MAADGYLPDWLEDNLSEGIREWWALKPGAPQPKANQQHQDNARGLVLPGYKYLGPGNGLDKGEPVNAADAAALEHDKAYDQQLKAGDNPYLKYNHADAEFQERLKEDTSFGGNLGRAVFQAKKRLLEPLGLVEEAAKTAPGKKRPVEQSPQEPDSSAGIGKSGAQPAKKRLNFGQTGDTESVPDPQPIGEPPAAPSGVGSLTMASGGGAPVADNNEGADGVGSSSGNWHCNSQWLGDRVITTSTRTWALPTYNNHLYKQISNSTSGGSSNDNAYFGYSTPWGYFDFNRFHCHFSPRDWQRLINNNWGFRPKRLNFKLFNIQVKEVTDNNGVKTIANNLTSTVQVFTDSDYQLPYVLGSAHEGCLPPFPADVFMIPQYGYLTLNDGSQAVGRSSFYCLEYFPSQMLRTGNNFQFSYEFENVPFHSSYAHSQSLDRLMNPLIDQYLYYLSKTINGSGQNQQTLKFSVAGPGNMAVQGRNYIPGPSYRQQRVSTTVTQNNNSEFAWPGASSWALNGRNSLMNPGPAMASHKEGEDRFFPLSGSLIFGKQGTGRDNVDADKVMITNEEEIKTTNPVATESYGQVATNHQSAQAQAQTGWVQNQGILPGMVWQDRDVYLQGPIWAKIPHTDGNFHPSPLMGGFGMKHPPPQILIKNTPVPADPPTAFNKDKLNSFITQYSTGQVSVEIEWELQKENSKRWNPEIQYTSNYYKSNNVEFAVNTEGVYSEPRPIGTRYLTRNL

SEQ ID NO: 723 - protein, 736 aa, synthetic construct
  REGION 1..736: note = source = /note="Description of Artificial Sequence: Synthetic polypeptide"
MAADGYLPDWLEDNLSEGIREWWALKPGAPQPKANQQHQDNARGLVLPGYRYLGPGNGLDKGEPVNAADAAALEHDKAYDQQLKAGDNPYLKYNHADAEFQERLKEDTSFGGNLGRAVFQAKKRLLEPLGLVEEAAKTAPGKKRPVEQSPQEPDSSAGIGKSGAQPAKKRLNFGQTGDTESVPDPQPIGEPPAAPSGVGSLTMASGGGAPVADNNEGADGVGSSSGNWHCDSQWLGDRVITTSTRTWALPTYNNHLYKQISNSTSGGSSNDNAYFGYSTPWGYFDFNRFHCHFSPRDWQRLINNNWGFRPKRLNFKLFNIQVKEVTDNNGVKTVANNLTSTVQVFTDSDYQLPYVLGSAHEGCLPPFPADVFMIPQYGYLTLNDGSQAVGRSSFYCLEYFPSQMLRTGNNFQFSYEFENVPFHSSYAHSQSLDRLMNPLIDQYLYYLSKTINGSGQNQQTLKFSVAGPSNMAVQGRNYIPGPSYRQQRVSTTVTQNNNSEFAWPGASSWALNGRNSLMNPGPAMASHKEGEDRFFPLSGSLIFGKQGTGRDNVDADKVMITNEEEIKTTNPVATESYGQVATNHQSAQAQAQTGWVQNQGILPGMVWQDRDVYLQGPIWAKIPHTDGNFHPSPLMGGFGMKHPPPQILIKNTPVPADPPTAFNKDKLNSFITQYSTGQVSVEIEWELQKENSKRWNPEIQYTSNYYKSNNVEFAVNTEGVYSGPRPIGTRYLTRNL

SEQ ID NO: 724 - protein, 736 aa, synthetic construct; identical to SEQ ID NO: 134
  REGION 1..736: note = source = /note="Description of Artificial Sequence: Synthetic polypeptide"

SEQ ID NO: 725 - protein, 736 aa, synthetic construct
  REGION 1..736: note = source = /note="Description of Artificial Sequence: Synthetic polypeptide"
MAADGYLPDWLEDNLSEGIREWWALKPGAPQPKANQQRQDNARGLVLPGYKYLGPGNGLDKGEPVNAADAAALEHDKAYDQQLKAGGNPCLKYNHADAEFQERLKEDTSFGGNLGRAVFQAKKRLLEPLGLVEEAAKTAPGKKRPVEQSPQEPDSSAGIGRSGAQPAKKRLNFGQTGDTESVPDPQPIGEPPAAPSGVGSLTMASGGGAPVADNNEGADGVGSSSGNWHCDSQWLGDRVITTSTRTWALPTYNNHLYKQISNSTSGGSSNDNAYFGYSTPWGYFDFNRFHCHFSPRDWQRLINNNWGFRPKRLNFKLFNIQVKEVTDNNGVKAIANNLTSTVQVFTDSDYQLPYVLGSAHEGCLPPFPADVFMIPQYGYLTLNDGSQAVGRSSFYCLEYFPSQMLRTGNNFQFSYEFENVPFHSSYAHSQSLDRLMNPLIDQYLYYLSKTIDGSGQNQQTLKFSVAGPSNMAVQGRNYIPGPSYRQQRVSTTVTQNNNSEFAWPGASSWALNGRNSLMDPGPAMASHKEGEDRFFPLSGSLIFGKQGTGRDNVDADKVMITNEEEIKTTNPVATESYGQVATNHQSAQAQAQTGWVQNQGILPGMVWQDRDVYLQGPIWAKIPHTGGNFHPSPLMGGFGMKHPPPQILIKNTPVPADPPTAFNKDKLNSFITQYSTGQVSVEIEWELQKENSKRWNPEIQYTSNYYKSNNVEFAVNTEGVYSEPRPIGTRYLTRNL

SEQ ID NO: 726 - protein, 736 aa, synthetic construct
  REGION 1..736: note = source = /note="Description of Artificial Sequence: Synthetic polypeptide"
MAADGYLPDWLEDNLSEGIREWWALKPGAPQPKANQQHQDNARGLVLPGYKYLGPGNGLDKGEPVNAADAAALEHDKAYDQQLKAGDNPYLKYNHADAEFQERLKEDTSFGGNLGRAVFQAKKRLLEPLGLVEEAAKTAPGKKRPVEQSPQEPDSSAGIGKSGAQPAKKRLNFGQTGDTESVPDPQPIGEPPAAPSGVGSLTMASGGGAPVADNNEGADGVGSSSGNWHCDSQWLGDRVITTSTRTWALPTYNNHLYKQISNSTSGGSSNDNAYFGYSTPWGYFDFNRFHCHFSPRDWQRLINNNWGFRPKRLNFKLFNIQVKEVTDNNGVKTIANNLTSTVQVFTDSDYQLPYVLGSAHEGCLPPFPADVFMIPQYGYLTLNDGSQAVGRSSFYCLEYFPSQMLRTGNNFQFSYEFENVPFHSSYAHSQSLDRLMNPLIDQYLYYLSKTINGSGQNQQTLKFSVAGPSNMAVQGRNYIPGPSYRQQRVSTTVTQNNNSEFAWPGASSWALNGRNSLMNPGPAMASHKEGEDRFFPLSGSLIFGKQGTGRDNVDADKVMITNEEEIKTTNPVATESYGQVATNHQSAQAQAQTGWVQNQGILPGMVWQDRDVYLQGPIWAKIPHTDGNFHPSPLMGGFGMKHPPPQILIKNTPVPADPPTAFNKDKLNSFITQYSTGQVSVEIEWELQKENSKRWNPEIQYTSNYYKPNNVEFAVNTEGVYSEPRPIGTRYLTRNL

SEQ ID NO: 727 - protein, 736 aa, synthetic construct
  REGION 1..736: note = source = /note="Description of Artificial Sequence: Synthetic polypeptide"
MAADGYLPDWLEDNLSEGIREWWALKPGAPQPKANQQHQDNARGLVLPGYKYLGPGNGLDKGEPVNAADAAALEHNKAYDQQLKAGDNPYLKCNHADAEFQERLKEDTSFGGNLGRAVFQAKKRPLEPLGLVEEAAKTAPGKKRPVEQSPQEPDSSAGIGKSGAQPAKKRLNFGQTGDTESVPDPQPIGEPPAAPSGVRSLTMASGGGAPVADNNEGADGVGSSSGNWHCDSQWLGDRVITTSTRTWALPTYNNHLYKQISNSTSGGSSNDNAYLGYSTPWGYFDFNRFHCHFSPRDWQRLINNNWGFRPKRLNFKLFNIQVKEVTDNNGVKTIANNLTSTVQVFTDSDYQLPYVLGSAHEGCLPPFPADVFMIPQYGYLTLNDGSQAVGRSSFYCLEYFPSQMLRTGNNFQFSYEFENVPFHSSYAHSQSLDRLMNPLIDQYLYYLSKTINGSGQNQQTLKFSVAGPSNMAVQGRNYIPGPSYRQQRVSTTVTQNNNSEFAWPGASSWALNGRNSLMNPGPTMASHKEGEDRFFPLSGSLIFGKQGTGRDNVDADKVMITNEEEIKTTNPVATESYGQVATNHQSAQAQAQTGWVQNQGILPGMVWQDRDVYLQGPIWAKIPHTDGNFHPSPLMGGFGMKHPPPQILIKNTPVPADPPTAFNKDKLNSFITQYSTGQVSVEIEWELQKENSKRWNPEIQYTSNYYKSNNVEFAVNTEGVYSEPRPIGTRYLTRNL

SEQ ID NO: 728 - protein, 736 aa, synthetic construct
  REGION 1..736: note = source = /note="Description of Artificial Sequence: Synthetic polypeptide"
MAADGYLPDWLEDNLSEGIREWWALKPGAPQPKANQQHQDNARGLVLPGYKYLGPGNGLDKGEPVNAADAAALVHDKAYDQQLKAGDNPYLKCNHADAEFQERLKEDTSFGGNLGRAVFQAKKRLLEPLGLVEEAAKTAPGKKRPVEQSPQEPDSSAGIGKSGAQPAKKRLNFGQTGDTESVPDPQPIGEPPAAPSGVGSLTMASGGGAPVADNNEGADGVGSSSGNWHCDSQWLGDRVITTSTRTWALPTYNNHLYKQISNSTSGGSSNDNAYLGYSTPWGYFDFNRFHCHFSPRDWQRLINNNWGFRPKRLNFKLFNIQVKEVTDNNGVKTIANNLTSTVQVFTDSDYQLPYVLGSAHEGCLPPFPADVFTIPQYGYLTLNDGSQAVGRSSFYCLEYFPSQMLRTGNNFQFSYEFENVPFHSSYAHSQSLDRLMNPLIDQYLYYLSKTINGSGQNQQTLKFSVAGPSNMAVQGRNYIPGPSYRQQRVSTTVTQNNNSEFAWPGASSWALNGRNSLMNPGPAMASHKEGEDRFFPLSGSLIFGKQGTGRDNVDADKVMITNEEEIKTTNPVATESYGQVATNHQSAQAQAQTGWVQNQGILPGMVWQDRDVYLQGPIWAKIPHTDGNFHPSPLMGGFGMKHPPPQILIKNTPVPADPPTAFNKDKLNSFITQYSTGQVSVEIEWELQKENSKRWNPEIQYTSNYYKSNNVEFAVNTEGVYSEPRPIGPRYLTRNF

SEQ ID NO: 729 - protein, 736 aa, synthetic construct
  REGION 1..736: note = source = /note="Description of Artificial Sequence: Synthetic polypeptide"
MAADGYLPDWLEDNLSEGIREWWALKPGAPQPKANQQHQDNARGLVLPGYKYLGPGNGLDKGEPVNAADAAALEHNKAYDQQLKAGDNPYLKCNHADAEFQERLKEDTSFGGNLGRAVFQAKKRLLEPLGLVEEAAKTAPGKKRPVEQSPQEPDSSAGIGKSGAQPAKKRLNFGQTGDTESVPDPQPIGEPPAAPSGVRSLTMASGGGAPVADNNEGADGVGSSSGNWHCDSQWLGDRVITTSTRTWALPTYNNHLYKQISNSTSGGSSNDNAYLGYSTPWGYFDFNRFHCHFSPRDWQRLINNNWGFRPKRLNFKLFNIQVKEVTDNNGVKTIANNLTSTVQVFTDSDYQLPYVLGSAHEGCLPPFPADVFMIPQYGYLTLNDGSQAVGRSSFYCLEYFPSQMLRTGNNFQFSYEFENVPFHSSYAHSQSLDRLMNPLIDQYLYYLSKTINGSGQNQQTLKFSVAGPSNMAVQGRNYIPGPSYRQQRVSTTVTQNNNSEFAWPGASSWALNGRNSLMNPGPAMASHKEGEDRFFPLSGSLIFGKQGTGRDNVDADKVMITNEEEIKTTNPVATESYGQVATNHQSAQAQAQTGWVQNQGILPGMVWQDRDVYLQGPIWAKIPHTDGNFHPSPLMGGFGMKHPPPQILIKNTPVPADPPTAFNKDKLNSFITQYSTGQVSVEIEWELQKENSKRWNPEIQYTSNYYKSNNVEFAVNTEGVYSEPRPIGTRYLTRNL

SEQ ID NO: 730 - protein, 736 aa, synthetic construct
  REGION 1..736: note = source = /note="Description of Artificial Sequence: Synthetic polypeptide"
MAADGYLPDWLEDNLSEGIREWWALKPGAPQPKANQQHQDNARGLVLPGYKYLGPGNGLDKGEPVNAADAAALEHDKAYDQQLKAGDNPYLKCNHADAEFQERLKEDTSFGGNLGRAVFQAKKRLLEPLGLVEEAAKTAPGKKRPVEQSPQEPDSSAGIGKSGAQPAKKRLNFGQTGDTESVPDPQPIGEPPAAPSGVGSLTMASGGGAPVADNNEGADGVGSSSGNWHCDSQWLGDRVITTSTRTWALPTYNNHLYKQISNSTSGGSSNDNAYLGYSTPWGYFDFNRFHCHFSPRDWQRLINNNWGFRPKRLNFELFNIQVKEVTDNNGVKTIANNLTSTVQVFTDSDYQLPYVLGSAHEGCLPPFPADVFMIPQYGYLTLNDGSQAVGRSSFYCLEYFPSQMLRTGNNFQSSYEFENVPFHSSYAHSQSLDRLMNPLIDQYLYYLSKTINGSGQNQQTLKFSVAGPSNMAVQGRNYIPGPSYRQQRASTTVTQNNNSEFAWPGASSWALNGRNSLMNPGPAMASHKEGEDRFFPLSGSLIFGKQGTGRDNVDADKVMITNEEEIKTTNPVATESYGQVATNHQSAQAQAQTGWVQNQGILPGMVWQDRDVYLQGPIWAKIPHTDGNFHPSPLMGGFGMKHPPPQILIKNTPVPADPPTAFNKDKLNSFITQYSTGQVSVEIEWELQKENSKRWNPEIQYTSNYYKSNNVEFAVNTEGVYSEPRPIGTRYLTRNL

SEQ ID NO: 731 - protein, 736 aa, synthetic construct
  REGION 1..736: note = source = /note="Description of Artificial Sequence: Synthetic polypeptide"
MAADGYLPDWLEDNLSEGIREWWALKPGAPQPKANQQHQDNARGLVLPGYKYLGPGNGLDKGEPVNAADAAALEHDKAYDQQLKAGDNPYLKCNHADAEFQERLKEDTSFGGNLGRAVFQAKKRLLEPLGLVEEAAKTAPGKKRPVEQSPQEPDSSAGIGKSGAQPAKKRLNFGQTGDTESVPDPQPIGEPPAAPPGVGSLTMASGGGAPVADNNEGADGVGSSSGNWHCDSQWLGDRVITTSTRTWALPTYNNHLYKQISNSTSGGSSNDNAYLGYSTPWGYFDFNRFHCHFSPRDWQRLINNNWGFRPKRLNFKLFNIQVKEVTDNNGVKTIANNLTSTVQVFTDSDYQLPYVLGSAHEGCLPPFPADVFMIPQYGYLTLNDGSQAVGRSSFYCLEYFPSQMLRTGNNFQFSYEFENVPFHSSYAHSQSLDRLMNPLIDQYLYYLSKTISGSGQNQQTLKFSVAGPSNMAVQGRNYIPGPSYRQQRVSTTVTQNNSSEFAWPGASSWALNGRNSLMNPGPAMASHKEGEDRFFPLSGSLIFGKQGTGRDNVDADKVMITNEEEIKTTNPVATESYGQVATNHQSAQAQAQTGWVQNQGILSGMVWQDRDVYLQGPIWAKIPHTDGNFHPSPLMGGFGMKHPPPQILIKNTPVPADPPTAFNKDKLNSFITQYSTGQVSVEIEWELQKENSKRWNPEIQYTSNYYKSNNVEFAVNTEGVYSEPRPIGTRYLTRNL

SEQ ID NO: 732 - protein, 736 aa, synthetic construct
  REGION 1..736: note = source = /note="Description of Artificial Sequence: Synthetic polypeptide"
MAADGYLPDWLEDNLSEGIREWWALKPGAPQPKANQQHQDNARGLVLPGYKYLGPGNGLDKGEPVNAADAAALEHDKAYDQQLKAGDNPYLKCNHADAEFQERLKEDTSFGGNLGRAVFQAKKRLLEPLGLVEEAAKTAPGKKRPVEQSPQEPDSSAGIGKSGAQPAKKRLNFGQTGDTESVPDPQPIGEPPAAPSGVGSLTMASGGGAPVADNNEGADGVGSSSGNWHCDSQWLGDRVITTSTRTWALPTYNNHLYKQISNSTSGGSSNDNAYLGYSTPWGYFDFNRFHCHFSPRDWQRLINNNWGFRPKRLNFKLFNIQVKEVTDNNGVKTIANNLTSTVQVFTDSDYQLPYVLGSAHEGCLPPFPADVFMIPQYGYLTLNDGSQAVGRSSFYCLEYFPSQMLRTGNNFQFSYEFENVPFHSSYAHSQSLDRLMNPLIDQYLYYLSKTINGSGQNQQTLKFSVAGPSNMAVQGRNYIPGPSYRQQRVSTTVTQNNNSEFAWPGASSWALNGRNSLMNPGPAMASHKEGEDRFFPLSGSLIFGKQGTGRDNVDADKVMITNEEEIKTTNPVATESYGQVATNHQSAQAQAQTGWVQNQGILPGMVWQDRDVYLQGPIWAKIPHTDGNFHPSPLMGGFGMKHPPPQILIKNTPVPADPPTAFNKDKLNSFITQYSTGQVSVEIEWELQKENSKRWNPEIQYTSNYYKSNNVEFAVNTEGVYSEPRPIGTRYLTRNL

SEQ ID NO: 733 - protein, 736 aa, synthetic construct; identical to SEQ ID NO: 732
  REGION 1..736: note = source = /note="Description of Artificial Sequence: Synthetic polypeptide"

SEQ ID NO: 734 - protein, 736 aa, synthetic construct
  REGION 1..736: note = source = /note="Description of Artificial Sequence: Synthetic polypeptide"
MAADGYLPDWLEDNLSEGIREWWALKPGAPQPKANQQHQDNARGLVLPGYKYLGPGNGLDKGEPVNAADAAALEHDKAYDQQLKAGDNPYLKCNHADAEFQERLKEDTSFGGNLGRAVFQAKKRLLEPLGLVEEAAKTAPGKKRPVEQSPQEPDSSAGIGKSGAQPAKKRLNFGQTGDTESVPDPQPIGEPPAAPSGVGSLTMASGGGAPVADNNEGADGVGSSSGNWHCDSQWLGDRVITTSTRTWALPTYNNHLYKQISNSTSGGSSNDNAYLDYSTPWGYFDFNRFHCHFSPRDWQRLINNNWGFRPKRLNFKLFNIQVKEVTDNNGVKTIANNLTSTVQVFTDSDYQLPYVLGSAHEGCLPPFPADVFMIPQYGYLTLNDGSQAVGRSSFYCLEYFPSQMLRTGNNFQFSYEFENVPFHSSYAHSQSLDRLMNPLIDQYLYYLSKTINGSGQNQQTLKFSVAGPSNMAVQGRNYIPGPSYRQQRVSTTVTQNNNSEFAWPGASSWALNGRNSLMNPGPAMASHKEGEDRFFPLSGSLIFGKQGTGRDNVDADKVMITNEEEIKTTNPVATESYGQVATNHQSAQAQAQTGWVQNQGILPGMVWQGRDVYLQGPIWAKIPHTDGNFHPSPLMGGFGMKHPPPQILIKNTPVPADPPTAFNKDKLNSFITQYSTGQVSVEIEWELQKENSKRWNPEIQYTSNYYKSNNVEFAVNTEGVYSEPRPIGTRYLTRNL

SEQ ID NO: 735 - protein, 736 aa, synthetic construct; identical to SEQ ID NO: 732
  REGION 1..736: note = source = /note="Description of Artificial Sequence: Synthetic polypeptide"

SEQ ID NO: 736 - protein, 736 aa, synthetic construct
  REGION 1..736: note = source = /note="Description of Artificial Sequence: Synthetic polypeptide"
MAADGYPPDWLEDNLSEGIREWWALKPGAPQPKANQQHQDNARGLVLPGYKYLGPGNGLDKGEPVNAADAAALEHDKAYDQQLKAGDNPHLKYNHADAEFQERLKEDTSFGGNLGRAVFQAKKRLLEPLGLVEEAAKTAPGKKRPVEQSPQEPDSSAGIGKSGAQPAKKRLNFGQTGDTESVPDPQPIGEPPAAPSGVGSLTMASGGGAPVADNNEGADGVGSSSGNWHCDSQWLGDRVITTSTRTWALPTYNNHLYKQISNSTSGGSSNDNAYFGYSTPWGYFDFNRFHCHFSPRDWQRLINNNWGFRPKRLNFKLFNIQVKEVTDNNGVKTIANNLTSTVQVFTDSDYQLPYVLGSAHEGCLPPFPADVFMIPQYGYLTLNDGSQAVGRSSFYCLEYFPSQMLRTGNNFQFSYEFENVPFHSSYAHSQSLDRLMNPLIDQYLYYLSKTINGSGQNQQTLKFSVAGPSNMAVQGRNYIPGPSYRQQRVSTTVTQNNNSEFAWPGASSWALNGRNSLMNPGPAMASHKEGEDRFFPLSGSLIFGKQGTGRDNVDADKVMITNEEEIKTTNPVATESYGQVATNHQSAQAQAQTGWVQNQGILPGMVWQDRDVYLQGPIWAKIPHTDGNFHPSPLMGGFGVKHPPPQILIKNTPVPADPPTAFNKDRLNSFITQYSTGQVSVEIEWELQKENSKRWNPEIQYTSNYYKSNNVEFAVNTEGVYSEPRPIGTRYLTRNL

SEQ ID NO: 737 - protein, 736 aa, synthetic construct
  REGION 1..736: note = source = /note="Description of Artificial Sequence: Synthetic polypeptide"
MAADGYLPDWLEDNLSEGIREWWALKPGAPQPKANQQHQDNARGLVLPGYKYLGPGNGLDKGEPVNAADAAALEHDKAYDQQLKAGDNPYLKYNHADAEFQERLKEDTSFGGNLGRAVFQAKKRLLEPLGLVEEAAKTAPGKKRPVEQSPQEPDSSAGIGKSGAQPAKKRLNFGQTGDTESVPDPQPIGEPPAAPSGVGSLTMASGGGAPVADNNEGADGVGSSSGNWHCDSQWLGDRVITTSTRTWALPTYNNHLYKQISNSTSGGSSNDNAYFGYSTPWGYFDFNRFHCHFSPRDWQRLINNNWGFRPKRLNFKLFNIQVKEVTDNNGVKTIANNLTSTVQVFTDSDYQLPYVLGSAHEGCLPPFPADVFMIPQYGYLTLNDGSQAVGRSSFYCLEYFPSQMLRTGNNFQFSYEFENVPFHSSYAHSQSLDRLMNPLIDQYLYYLSKTINGSGQNQQTLKFSVAGPSNMAVQGRNYIPGPSYRQQRVSTTVTQNNNSEFAWPGASSWALNGRNSLMNPGPAMASHKEGEDRFFPLSGSLIFGKQGTGRDNVDADKVMITNEEEIKTTNPVATESYGQVATNHQSAQAQAQTGWVQNQGILPGMVWQDRDVYLQGPIWAKIPHTDGNFHPSPLMGGFGVKHPPPQILIKNTPVPADPPTAFNKDKLNSFITQYSTGQVSVEIEWELQKENSKRWNPEIQYTSNYYKSNNVEFAVNTEGVYSEPRPIGTRYLTRNL

SEQ ID NO: 738 - protein, 736 aa, synthetic construct
  REGION 1..736: note = source = /note="Description of Artificial Sequence: Synthetic polypeptide"
MAADGYLPDWLEDNLSEGIREWWALKPGAPQPKANQQHQDNARGLVLPGYKYLGPGNGLDKGEPVNAADAAALEHDKAYDQQLKAGDNPYLKYNHADAEFQERLKEDTSFGGNLGRAVFQAKKRLLEPLGLVEEAAKTAPGKKRPVEQSPQEPDSSAGIGKSGAQPAKKRLNFGQTGDTESVPDPQPIGEPPAAPSGVGSLTMASGGGAPVADNNEGADGVGSSSGNWHCDSQWLGDRVITTSTRTWALPTYNNHLYKQISNSTSGGSSNDNAYFGYSTPWGYFDFNRFHCHFSPRDWQRLTNNNWGFRPKRLNFKLFNIQVKEVTDNNGVKTIANNLTSTVQVFTDSDYQLPYVLGSAHEGCLPPFPADVFMIPQYGYLTLNDGSQAVGRSSFYCLEYIPSQMLRTGNNFQFSYEFENVPFHSSYAHSQSLDRLMNPLIDQYLYYLSKTINGSGQNQQTLKFSVAGPSNMAVQGRNYIPGPSYRQQRVSTTVTQNNNSEFAWPGASSWALNGRNSLMNPGPAMASHKEGEDRFFPLSGSLIFGKQGTGRDNVDADKVMITNEEEIKTTNPVATESYGQVATNHQSAQAQAQTGWVQNQGILPGMVWQDRDVYLQGPIWAKIPHTDGNFHPSPLMGGFGVKHPPPQILIKNTPVPADPPTAFNKDKLNSFITQYSTGQVSVEIEWELQKENSKRWNPEIQYTSNYYKSNNVEFAVNTEGVYSEPRPIGTRYLTRNL

SEQ ID NO: 739 - protein, 736 aa, synthetic construct
  REGION 1..736: note = source = /note="Description of Artificial Sequence: Synthetic polypeptide"
MAADGYLPDWLEDNLSEGIREWWALKPGAPQPKANQQHQDNARGLVLPGYKYLGPGNGLDKGEPVNAADAAALEHDKAYDQQLKAGDNPYLKYNHADAEFQERLKEDTSFGGNLGRAVFQAKKRLLEPLGLVEEAAKTAPGKKRPVEQSPQEPDSSAGIGKSGAQPAKKRLNFGQTGDTESVPDPQPIGEPPAAPSGVGSLTMASGGGAPVADNNEGADGVGSSSGNWHCDSQWLGDRVITTSTRTWALPTYNNHLYKQISNSTSGGSSNDNAYFGYSTPWGYFDFNRFHCHFSPRDWQRLINNNWGFRPKRLNFKLFNIQVKEVTDNNGVKTIANNLTSTVQVFTDSDYQLPYVLGSAHEGCLPPFPADVFMIPQYGYLTLNDGSQAVGRSSFYCLEYFPSQMLRTGNNFQFSYEFENVPFHSSYAHSQSLDRLMNPLIDQYLYYLSKTINGSGQNQQTLKFSVAGPSNMAVQGRNYIPGPSYRQQRVSTTVTQNNNSEFAWPGASSWALNGRNSLMNPGPAMASHKEGEDRFFPLSGSLISGKQGTGRDNVDANKVMITNEEEIKTTNPVATESYGQVATNHQSAQAQAQTGWVQNQGILPGMVWQDRDVYLQGPIWAKIPHTDGNFHPSPLMGGFEMKHPPPQILIKNTPVPADPPTAFNKDKLNSFITQYSTGQVSVEIEWELQKENSKRWNPEIQYTSNYYKSNNVEFAVNTEGVYSEPRPIGTRYLTRNL

SEQ ID NO: 740 - protein, 736 aa, synthetic construct
  REGION 1..736: note = source = /note="Description of Artificial Sequence: Synthetic polypeptide"
MAADGYLPDWLEDNLSEGIREWWALKPGAPQPKANQQHQDNARGLVLPGYKYLGPGNGLDKGEPVNAADAAALEHDKAYDQQLKAGDNPYLKYNHADAEFQERLKEDTSFGGNLGRAVFQAKKRLLEPLGLVEEAAKTAPGKKRPVEQSPQEPDSSAGIGKSGAQPAKKRLNFGQTGDTESVPDPQPIGEPPAAPSGVGSLTIASGGGAPVADNNEGADGVGSSSGNWHCDSQWLGDRVITTSTRTWALPTYNNHLYKRISNSTSGGSSNDNAYFGYSTPWGYFDFNRFHCHFSPRDWQRLINNNWGFRPKRLNFKLFNIRVKEVTDNNGVKTITNNLTSTVQVFTDSDYQLPYVLGSAHEGCLPPFPADVFMIPQYGYLTLNDGSQAVGRSSFYCLEYFPSQMLRTGNNFQFSYEFENVPFHSSYAHSQSLDRLMNPLIDQYLYYLSKTINGSGQNQQTLKFSVAGPSNMAVQGRNYIPGPSYRQQRVSTTVTRNNNSEFAWPGASSWALNGRNSLMNPGPAMASHKEGEDRFFPLSGSLIFGKQGTGRDNVDADKVMITNEEEIKTTNPVATESYGQVATNHQSAQAQAQTGWVQNQGILPGMVWQDRDVYLQGPIWAKIPHTDGNFHPSPLMGGFGVKHPPPQILIKNTPVPADPPTAFNKDKLNSFITQYSTGQVSVEIEWELQKENSKRWNPEIQYTSNYYKSNNVEFAVNTEGVYSEPRPIGTRYLTRNL

SEQ ID NO: 741 - protein, 736 aa, synthetic construct
  REGION 1..736: note = source = /note="Description of Artificial Sequence: Synthetic polypeptide"
MAADGYLPDWLEDNLSEGIREWWALKPGAPQPKANQQHQDNARGLVLPGYKYLGPGNGLDKGEPVNAADAAALEHDKAYDQQLKAGDNPYLKYNHADAEFQERLKEDTSFGGNLGRAVFQAKKRLLEPLGLVEEAAKTAPGKKRPVEQSPQEPDSSAGIGKSGAQPAKKRLNFGQTGDTEPVPDPQPIGEPPAAPSGVGSLTMASGGGAPVADNNEGADGVGSSSGNWHCDSQWLGDRVITTSTRTWALPTYNNHLYKQISNSTSGGSSNDNAYFGYSTPWGYFDFNRFHCHFSPRDWQRLINNNWGFRPKRLNFKLFNIQVKEVTDNNGVKTIANNLTSTVQVFTDSDYQLPYVLGSAHEGCLPPFPAGVFMIPQYGYLTLNDGSQAVGRSSFYCLEYFPSQMLRTGNNFQFSYEFENVPFHSSYAHSQSLDRLMNPLIDQYLYYLSKTINGSGQNQQTLKFSVAGPSNMAVQGRNYIPGPSYRQQRVSTTATQNNNSEFAWPGASSWALNGRNSLMNPGPAMASHKEGEDRFFPLSGSLIFGKQGTGRDNVDADKVMITNEEEIKTTNPVATESYGQVATNHQSAQAQAQTGWVQNQGILPGMVWQDRDVYLQGPIWAKIPHTDGNFHPSPLMGGFGMKHPPPQILIKNTPVPADPPTAFNKDKLNSFITQYSTGQVSVEIEWELQKENSKRWNPEIQYTSNYYKSNNVEFAVNTEGVYSEPRPIGTRYLTRNL

SEQ ID NO: 742 - protein, 736 aa, synthetic construct
  REGION 1..736: note = source = /note="Description of Artificial Sequence: Synthetic polypeptide"
MAADGYLPDWLEDNLSEGIREWWALKPGAPQPKANQQHQDNARGLVLPGYKYLGPGNGLDKGEPVNAADAAALEHDKAYDQQLKAGDNPYLKYNHADAGFQERLKEDTSFGGNLGRAVFQAKKRLLEPLGLVEEAAKTAPGKKRPVEQSPQEPDSSAGIGKSGAQPAKKRLNFGQTGDTESVPVPQPIGEPPAAPSGVGSLTMASGGGAPVADNNEGADGVGSSSGNWHCDSQWLGDRVITTSTRTWALPTYNNHLYKQISNSTSGGSSNDNAYFGYSTPWGYFDFNRFHCHFSPRDWQRLINNNWGFRPKRLNFKLFNIQVKEVTDNNGVKTIANNLTSTVQVFTDSDYQLPYVLGSAHEGCLPPFPADVFMIPQYGYLTLNDGSQAVGRSSFYCLEYFPSQMLRTGNNFQFSYEFENVPFHSSYAHSQSLDRLMNPLIDQYLYYLSKTINGSGQNQQTLKFSVAGPSNMAVQGRNYIPGPSYRQQRVSTTVTQNNNSEFAWPGASSWALNGRNSLMNPGPAMASHKEGEDRFFPLSGSLIFGKQGAGRDNVDADKVMITNEEEIKTTNPVATESYGQVATNHQSAQAQAQTGWVQNQGILPGMVWQDRDVYLQGPIWAKIPHTDGNFHPSPLMGGFGMKHPPPQILIKNTPVPADPPTAFNKDKLNSFITQYSTGQVSVEIEWELQKENSKRWNPEIQYTSNYYKSNNVEFAVNTEGVYSEPRPIGTRYLTRNL

SEQ ID NO: 743 - protein, 736 aa, synthetic construct
  VARIANT 126: note = MOD_RES - Any naturally occurring amino acid
  REGION 1..736: note = source = /note="Description of Artificial Sequence: Synthetic polypeptide"
MAADGYLPDWLEDNLSEGIRERWALKPGAPQPKANQQHQDNARGLVLPGYKYLGPGNGLDKGEPVNAADAAALEHDKAYDQQLKAGDNPYLKYNHADAEFQERLKEDTSFGGNLGRAVFQAKKRLXEPLGLVEEAAKTAPGKKRPVEQSPQEPDSSAGIGKSGAQPAKKRLNFGQTGDTESVPDPQPIGEPPAAPSGVGSLTMASGGGAPVADNNEGADGVGSSSGNWHCDSQWLGDRVITTSTRTWALPTYNNHLYKQISNSTSGGSSNDNAYFGYSTPWGYFDFNRFHCHFSPRDWQRLINNNWGFRPKRLNFKLFNIQVKEVTDNNGVKTIANNLTSTVQVFTDSDYQLPYVLGSAHEGCLPPFPADVFMIPQYGYLTLNDGSQAVGRSSFYCLEYFPSQMLRTGNNFQFSYEFENVPFHSSYAHSQSPDRLMNPLIDQYLYYLSKTINGSGQNQQTLKFSVAGPSNMAVQGRNYIPGPSYRQQRVSTTVTQNNNSEFAWPGASSWALNGRNSLMNPGPAMASHKEGEDRFFPLSGSLIFGKQGTGRDNVDADKVMITNEEEIKTTNPVATESYGQVATNHQSAQAQAQTGWVQNQGILPGMVWQDRDVYLQGPIWAKIPHTDGNFHPSPLMGGFGVKHPPPQILIKNTPVPADPPTAFNKDKLNSFITQYSTGQVSVEIEWELQKENSKRWNPEIQYTSNYYKSNNVEFAVNTEGVYSEPRPIGTRYLTRNL

SEQ ID NO: 744 - protein, 736 aa, synthetic construct
  REGION 1..736: note = source = /note="Description of Artificial Sequence: Synthetic polypeptide"
MAADGYLPDWLEDNLSEGIREWWALKPGAPQPKANQQHQDNARGLVLPGYKYLGPGNGLDKGEPVNAADAAALEHDKAYDQQLKAGDNPYLKYNHADAEFQERLKEDTSFGGNLGRAVFQAKKRLLEPLGLVEEAAKTAPGKKRPVEQSPQEPDSSAGIGKSGAQPAKKRLNFGQTGDTESVPDPQPIGEPPAAPSGVGSLTMASGGGAPVADNNEGADGVGSSSGNWHCDSQWLGDRVITTSTRTWALPTYNNHLYKQISNSTSGGSSNDNAYLGYSTPWGYFDFNRFHCHFSPRDWQRLINNNWGFRPKRLNFKLFNIQVKEVTDNNGVKTIANNLTSTVQVFTDSDYQLPYVLGSAHEGCLPPFPADVFMIPQYGYLTLNDGSQAVGRSSFYCLEYFPSQMLRTGNNFQFSYEFENVPFHSSYAHSQSLDRLMNPLIDQYLYYLSKTINGSGQNQQTLKFSVAGPSNMAVQGRNYIPGPSYRQQRVSTTVTQNNNSEFAWPGASSWALNGRNSLMNPGPAMASHKEGEDRFFPLSGSLIFGKQGTGRDNVDADKVMITNEEEIKTTNPVATESYGQVATNHQSAQAQAQTGWVQNQGILPGMVWQDRDVYLQGPIWAKIPHTDGNFHPSPLMGGFGMKHPPPQILIKNTPVPADPPTAFNKDKLNSFITQYSTGQVSVEIEWELQKENSKRWNPEIQYTSNYYKSNNVEFAVNTEGVYSEPRPIGTRYLTRNL

SEQ ID NO: 745 - protein, 736 aa, synthetic construct
  REGION 1..736: note = source = /note="Description of Artificial Sequence: Synthetic polypeptide"
MAADGYLPDWLEDNLSEGIREWWALKPGAPQPKANQQHQDNARGLVLPGYKYLGPGNGLDKGEPVNAADAAALEHDKAYDQQLKAGDNPYLKYNHADAEFQERLKEDTSFGGNLGRAVFQAKKRLLEPLGLVEEAAKTAPGKKRPVEQSPQEPDSSAGIGKSGAQPAKKRLNFGQTGDTESVPDPQPIGEPPAAPSGVGSLTMASGGGAPVADNNEGADGVGSSSGNWHCDSQWLGDRVITTSTRTWALPTYNNHLYKQISNSTSGGSSNDNAYFGYSTPWGYFDFNRFHCHFSPRDWQRLINNNWGFRPKRLNFKLFNIQVKEVTDNNGVKTIANNLTSTVQVFTDSDYQLPYVLGSAHEGCLPPFPADVFMIPQYGYLTLNDGSQAVGRSSFYCLEYFPSQMLRTGNNFQFSYEFENVPFHSSYAHSQSLDRLMNPLIDQYLYYLSKTINGSGQNQQTLKFSVAGPSNMAVQGRNYIPGPSYRQQRVSTTVTQNNNSEFAWPGASSWALNGRNSLMNPGPAMASHKEGEDRFFPLSGSLIFGKQGTGRDNVDADKVMITNEEEIKTTNPVATESYGQVATNHQSAQAQAQTGWVQNQGILPGMVWQDRDVYLQGPIWAKIPHTDGNFHPSPLMGGFGMKHPPPQILIKNTPVPADPPTAFNKDKLDSFITQYSTGQVSVEIEWELQKENSKRWNPVIQYTSNYYKSNNVEFAVNTEGVYSEPRPIGTRYLTRNL

SEQ ID NO: 746 - protein, 736 aa, synthetic construct
  REGION 1..736: note = source = /note="Description of Artificial Sequence: Synthetic polypeptide"
MAADGYLPDWLEDNLSEGIREWWDLKPGAPKPKANQQKQDDGRGLVLPGYKYLGPFNGLDKGEPVNAADAAALEHDKAYDQQLKAGDNPYLRYNHADAEFQERLQEDTSFGGNLGRAVFQAKKRVLEPLGLVEEGAKTAPGKKRPVEQSPQEPDSSSGIGKTGQQPAKKRLNFGQTGDSESVPDPQPLGEPPATPAAVGPTTMASGGGAPMADNNEGVDGVGNASGNWHCDSTWLGDRVITTSTRTWALPTYNNHLYKQISSASTGASNDNHYFGYSTPWGYFDFNRFHCHFSPRDWQRLINNNWGFRPKRLNFKLFNIQVKEVTTNDGVTTIANNLTSTVQVFSDSEYQLPYVLGSAHQGCLPPFPADVFMIPQYGYLTLNNGSQAVGRSSFYCLEYFPSQMLRTGNNFTFSYTFEEVPFHSSYAHSQSLDRLMNPLIDQYLYYLNRTQNQSGSAQNKDLLFSRGSPAGMSVQPKNWLPGPCYRQQRVSKTKTDNNNSNFTWTGASKYNLNGRESIINPGTAMASHKDDEDKFFPMSGVMIFGKESAGASNTALDNVMITDEEEIKATNPVATERFGTVAVNFQSSSTDPATGDVHAMGALPGMVWQDRDVYLQGPIWAKIPHTDGHFHPSPLMGGFGLKNPPPQILIKNTPVPANPPAEFSATKLASFITQYSTGQVSVEIEWELQKENSKRWNPEVQYTSNYAKSANVDFTVDNNGLYTEPRPIGTRYLTRPL

SEQ ID NO: 747 - protein, 736 aa, synthetic construct
  REGION 1..736: note = source = /note="Description of Artificial Sequence: Synthetic polypeptide"
MAADGYLPDWLEDNLSEGIREWWDLKPGAPKPKANQQKQDDGRGLVLPGYKYLGPFNGLDKGEPVNAADAAALEHDKAYDQQLKAGDNPYLRYNHADAEFQERLQEDTSFGGNLGRAVFQAKKRVLEPLGLVEEGAKTAPGKRRPVEQSPQEPDSSSGIGKTGQQPAKKRLNFGQTGDSESVPDPQPLGEPPATPAAVGPTTMASGGGAPMADNNEGADGVGNASGNWHCDSTWLGDRVITTSTRTWALPTYNNHLYKQISSASTGASNDNHYFGYSTPWGYFDFNRFHCHFSPRDWQRLINNNWGFRPKRLNFKLFNIQVKEVTTNDGVTTIANNLTSTVQVFSDSEYQLPYVLGSAHQGCLPPFPADVFMIPQYGYLTLNNGSQAVGRSSFYCLEYFPSQMLRTGNNFTFSYTFEEVPFHSSYAHSQSLDRLMNPLIDQYLYYLNRTQNQSGSAQNKDLLFSRGSPAGMSVQPKNWLPGPCYRQQRVSKTKTDNNNSNFTWTGASKYNLNGRESIINPGTAMASHKDDEDKFFPMSGVMIFGKESAGASNTALDNVMITDEEEIKATNPVATERFGTVAVNFQSSSTDPATGDVHAMGALPGMVWQDRDVYLQGPIWAKIPHTDGHFHPSPLMGGFGLKNPPPQILIKNTPVPANPPAEFSATKFASFITQYSTGQVSVEIEWELQKENSKRWNPEVQYTSNYAKSANVDFTVDNNGLYTEPRPIGTRYLTRPL

SEQ ID NO: 748 - protein, 736 aa, synthetic construct
  REGION 1..736: note = source = /note="Description of Artificial Sequence: Synthetic polypeptide"
MAADGYLPDWLEDNLSEGIREWWDLKPGAPKPKANQQKQDDGRGLVLPGYKYLGPFNGLDKGEPVNAADAAALEHDKAYDQQLKAGDNPYPRYNHADAEFQERLQEDTSFGGNLGRAVFQAKKRVLEPLGLVGEGAKTAPGKKRPVEQSPQEPDSSSGIGKTGQQPAKKRLNFGQTGDSESVPDPQPLGEPPATPAAVGPTTMASGGGAPMADNNEGADGVGNASGNWHCDSTWLGDRVITTSTRTWALPTYNNHLYKQISSASTGASNDNHYFGYSTPWGYFDFNRFHCHFSPRDWQRLINNNWGFRPKRLNFKLFNIQVKEVTTNDGVTTIANNLTSTVQVFSDSEYQLPYVLGSAHQGCLPPFPADVFMIPQYGYLTLNNGSQAVGRSSFYCLEYFPSQMLRTGNNFTFSYTFEEVPFHSSYAHSQSLDRLMNPPIDQYLYYLNRTQNQSGSAQNKDLLFSRGSPAGMSVQPKNWLPGPCYRQQRVSKTKTDNNNSNFTWTGASKYNLNGRESIINPGTAMASHKDDEDKFFPMSGVMIFGKESAGASNTALDNVMITDEEEIKATNPVATERFGTVAVNFQSSSTDPATGDVHAMGALPGMVWQDRDVYLQGPIWAKIPHTDGHFHPSPLMGGFGLKNPPPQILIKNTPVPANPPAEFSATKFASFITQYSTGQVSVEIEWELQKENSKRWNPEVQYTSNYAKSANVDFTVDNNGLYTEPRPIGTRYLTRPL

SEQ ID NO: 749 - protein, 736 aa, synthetic construct
  REGION 1..736: note = source = /note="Description of Artificial Sequence: Synthetic polypeptide"
MAADGYLPDWLEDNLSEGIREWWDLKPGAPKPKANQQKQDDGRGLVLPGYKYLGPFNGLDKGEPVNAADAAALEHDKAYDQQLKAGDNPYLRYNHADAEFQERLQEDTSFGGNLGRAVFQAKKRVLEPLGLVEEGAKTAPGKKRPVEQSPQEPDSSSGIGKTGQQPAKKRLNFGQTGDSESVPDPRPLGEPPATPAAVGPTTMASGGGAPMADNNEGADGVGNASGNWHCDSTWLGDRVITTSTRTWALPTYNNHLYKQISSASTGASNDNHYFGYSTPWGYFDFNRFHCHFSPRDWQRLINNNWGFRPKRLNFKLFNIQVKEVTTNDGVTTIANNLTSTVQVFSDSEYQLPYVLGSAHQGCLPPFPADVFMIPQYGYLTLNNGSQAVGRSSFYCLEYFPSQMLRTGNNFTFSYTFEEVPFHSSYAHSQSLDRLMNPLIDQYLYYLNRTQNQSGSAQNKDLLFSRGPPAGMSVQPKNWLPGPCYRQQRVSKTKTDNNNSNFTWTGASKYNLNGRESIINPGTAMASHKDDEDKFFPMSGVMIFGKESAGASNTALDNVMITDEEEIKATNPVATERFGTVAVNFQSSSTDPATGDVHAMGALPGMVWQDRDVYLQGPIWAKIPHTDGHFHPSPLMGGFGLKNPPPQILIKNTPVPANPPAEFSATKFASFITQYSTGQVSVEIEWELQKENSKRWNPEVQYTSNYAKSANVDFTVDNNGLYTEPRPIGTRYLTRPL

SEQ ID NO: 750 - protein, 736 aa, synthetic construct
  REGION 1..736: note = source = /note="Description of Artificial Sequence: Synthetic polypeptide"
MAADGYLPDWLEDNLSEGIREWWDLKPGAPKPKANQQKQDDGRGLVLPGYKYLGPFNGLDKGEPVNAADAAALEHDKAYDQQLKAGDNPYLRYNHADAEFQERLQEDTSFGGNLGRAVFQAKKRVLEPLGLVEEGAKTAPGKKRPVEQSPQEPDSSSGIGKTGQQPAKKRLNFGQTGGSESVPDPQPLGEPPATPAAVGPTTMASGGGAPMADNNEGADGVGNASGNWHCDSTWLGDRVITTSTRTWALPTYNNHLYKQISSASTGASNDNHYFGYSTPWGYFDFNRFHCHFSPRDWQRLINNNWGFRPKRLNFKLFNIQVKEVTTNDGVTTIANNLTSTVQVFSDSEYQLPYVLGSAHQGCLPPFPADVFMIPQYGYLTLNNGSQAVGRSSFYCLEYFPSQMLRTGNNFTFSYTFEEVPFHSSYAHSQSLDRLMNPPIDQYLYYLNRTQNQSGSAQNKDLLFSRGSPAGMSVQPKNWLPGPCYRQQRVSKTKTDNNNSNFTWTGASKYNLNGRESIINPGTAMASHKDDEDKFFPMSGVMIFGKESAGASNTALDNVMITDEEEIKATNPVATERFGTVAVNFQSSSTDPATGDVHAMGALPGMVWQDRDVYLQGPIWAKIPHTDGHFHPSPLMGGFGLKNPPPQILIKNTPVPANPPAEFSATKFASFITQYSTGQVSVEIEWELQKENSKRWNPEVQYTSNYAKSANVDFTVDNNGLYTEPRPIGTRYLTRPL

SEQ ID NO: 751 - protein, 736 aa, synthetic construct
  REGION 1..736: note = source = /note="Description of Artificial Sequence: Synthetic polypeptide"
MAADGYLPDWLEDNLSEGIREWWDLKPGAPKPKANQQKQDDGRGLVLPGYKYLGPFNGLDKGEPVNAADAAALEHDKAYDQQLKAGDNPYLRYNHADAEFQERLQEDTSFGGNLGRAVFQAKKRVLEPLGLVEEGAKTAPGKKRPVEQSPQEPDSSSGIGKTGQQPAKKRLNFGQTGDSESVPDPQPLGEPPATPAAVGPTTMASGGGAPMADNNEGADGVGNASGNWHCDSTWLGDRVITTSTRTWALPTYNNHLYKQISSASTGASNDNHYFGYSTPWGYFDFNRFHCHFSPRDWQRLINNNWGFRPKRLNFKLFNIQVKEVTTNDGVTTIANNLTSTVQVFSDSEYQLPYVLGSAHQGCLPPFPADVFMIPQYGYLTLNNGSQAVGRSSFYCLEYFPSQMLRTGNNFTFSYTFEEVPFHSSYAHSQSLDRLMNPLIDQYLYYLNRTQNQSGSAQNKDLLFSRGSPAGMSVQPKNWLPGPCYRQQRVSKTKTDNNNSNFTWTGASKYNLNGRESIINPGTAVASHKDDEDKFFPMSGVMIFGKESAGASNTALDNVMITDEEEIKATNPVATERFGTVAVNFQSSSTDPATGDVHAMGALPGMVWQDRDVYLQGPIWAKIPHTDGHFHPSPLMGGFGLKNPPPQILIKNTPVPANPPAEFSATKFASFITQYSTGQVSVEIEWELQKENSKRWNPEVQYTSNYAKSANVDFTVDNNGLYTEPRPIGTRYLTRPL

SEQ ID NO: 752 - protein, 736 aa, synthetic construct
  REGION 1..736: note = source = /note="Description of Artificial Sequence: Synthetic polypeptide"
MAADGYLPDWLEDNLSEGIREWWDLKPGAPKPKANQQKQDDGRGLVLPGYKYLGPFNGLDKGEPVNAADAAALEHDKAYDQQLKAGDNPYLRYNHADAEFQERLQEDTSFGGNLGRAVFQAKKRVLEPLGLVEEGAKTAPGKKRPVEQSPQEPDSSSGIGKTGQQPAKKRLNFGQTGDSESVPDPQPLGEPPATPAAVGPTTMASGGGAPMADNNEGADGVGNASGNWHCDSTWLGDRVITTSTRTWALPTYNNHLYKQISSASTGASNDNHYFGYSTPWGYFDFNRFHCHFSPRDWQQLINNNWGFRPKRLNFKLFNIQVKEVTTNDGVTTIANNLTSTVQVFSDSEYQLPYVLGSAHQGCLPPFPADVFMIPQYGYLTLNNGSQAVGRSSFYCLEYFPSQMLRTGNNFTFSYTFEEVPFHSSYAHSQSLDRLMNPLIDQYLYYLNRTQNQSGSAQNKDLLFSRGSPAGMSVQPKNWLPGPCYRQQRVSKTKTDNNNSNFTWTGASKYNLNGRESIINPGTAMASHKDDEDKFFPMSGVMIFGKESAGASNTALDNVMITDEEEIKATNPVATERFGTVAVNFQSTSTDPATGDVHAMGALPGMVWQDRDVYLQGPIWAKIPHTDGHFHPSPLMGGFGLKNPPPQILIKNTPVPANPPAEFSATKFASFITQYSTGQVSVEIEWELQKENSKRWNPEVQYTSNYAKSADVDFTVDNNGLYTEPRPIGTRYLTRPL

SEQ ID NO: 753 - protein, 736 aa, synthetic construct
  REGION 1..736: note = source = /note="Description of Artificial Sequence: Synthetic polypeptide"
MAADGYLPDWLEDNLSEGIREWWDLKPGAPKPKANQQKQDDGRGLVLPGYKYLGPFNGLDKGEPVNAADAAALEHDKAYDQQLKAGDNPYLRYNHADAEFQERLQEDTSFGGNLGRAVFQAKKRVLEPLGLVEEGAKTAPGKKRPVEQSPQEPDSSSGIGKTGQQPAKKRLNFGQTGDSESVPDPQPLGEPPATPAAVGPTTMASGGGAPMADNNEGADGVGNASGNWHCDSTWLGDRVITTSTRTWALPTYNNHLYKQISSASTGASNDNHYFGYSTPWGYFDFNRFHCHFSPRDWQRLINNNWGFRPKRLNFKLFNIQVKEVTTNDGVTTIANNLTSTVQVFSDSEYQPPYVLGSAHQGCLPPFPADVFMIPQYGHLTLNNGSQAVGRSSFYCLEYFPSQMLRTGNNFTFSYTFEEVPFHSSYAHSQSLDRLTNPLIDQYLYYLNRTQNQSGSAQNKDLLFSRGSPAGMSVQPKNWLPGPCYRQQRVSKTKTDNNNSNFTWTGASKYNLNGRESIINPGTAMASHKDDEDKFFPMSGVMIFGKESAGASNTALDNVMITDEEEIKATNPVATERFGTVAVNFQSSSTDPATGDVHAMGALPGMVWQDRDVYLQGPIWAKIPHTDGHFHPSPLMGGFGLKNPPPQILIKNTPVPANPPAEFSATKFASFITQYSTGQVSVEIEWELQKENSKRWNPEVQYTSNYAKSANVDFTVDNNGLYTEPRPIGTRYLTRPL

SEQ ID NO: 754 - protein, 736 aa, synthetic construct
  REGION 1..736: note = source = /note="Description of Artificial Sequence: Synthetic polypeptide"
MAADGYLPDWLEDNLSEGIREWWDLKPGAPKPKANQQEQDDGRGLVLPGYKYLGPFNGLDKGEPVNAADAAALEHDKAYDQQLKAGDNPYLRYNHADAEFQERLQEDTSFGGNLGRAVFQAKKRVLEPLGLVEEGAKTAPGKKRPVEQSPQEPDSSSGIGKTGQQPAKKRLNFGQTGDSESVPDPQPLGEPPATPAAVGPTTMASGGGAPMADNNEGADGVGNASGNWHCDSTWLGDRVITTSTRTWALPTYNNHLYKQISSASTGASNDNHYFGYSTPWGYFDFNRFHCHFSPRDWQRLINNNWGFRPKRLNFKLFNIQVKEVTTNDGVTTIANNLTSTVQVFSDSEYQLPYVLGSAHQGCLPPFPADVFMIPQYGYLTLNNGSQAVGRSSFYCLEYFPSQMLRTGNNFTFSYTFEEVPFHSSYAHSQSLDRLMNPLIDQYLYYLNRTQNQSGSAQNKDLLFSRGSPAGMSVQPKNWLPGPCYRQQRVSKTKTDNNNSNFTWTGASKYNLNGRESIINPGTAMASHKDDEDKFFPMSGVMIFGKESAGASNTALDNVMITDEEEIKATNPVATERFGTVAVNFQSSSTDPATGDVHATGTLPGMVWQDRDVYLQGPIWAKIPHTDGHFHPSPLMGGFGLKNPPPQILIKTTPVPANPPAEFSATKFASFITQYSTGQVSVEIEWELQKENSKRWNPEVQYTSNYAKSANVDFTVDDNGLYTEPRPIGTRYLTRPL

SEQ ID NO: 755 - protein, 736 aa, synthetic construct
  REGION 1..736: note = source = /note="Description of Artificial Sequence: Synthetic polypeptide"
MAADGYLPDWLEDNLSEGIREWWDLKPGAPKPKANQQKQDDGRGLVLPGYKYLGPFNGLDKGEPVNAADAAALEHDKAYDQQLKAGDNPYLRYNHADAEFQERLQEDTSFGGNLGRAVFQAKKRVLEPLGLVEEGAKTAPGKKRPVEQSLQEPDSSSGIGKTGQQPAKKRLNFGQTGDSESVPDPQPLGEPPATPAAVGPTTMASGGGAPMADNNEGADGVGNASGNWHCDSTWLGDRVITTSTRTWALPTYNNHLYKQISSASTGASNDNHYFGYSTPWGYFDFNRFHCHFSPRDWQRLINNNWGFRPKRLNFKLFNIQVKEVTTNDGVTTIANNLTSTVQVFSDSEYQLPYVLGSAHQGCLPPFPADVFMIPQYGYLTLNNGSQAVGRSSFYCLEYFPSQMLRTGNNFTFSYTFEEVPFHSSYAHSQSLDRLMNPLIDQYLYYLNRTQNQSGSAQNKDLLFSRGSPAGMSVQPKNWLPGPCYRQQRVSKTKTDNDNSNFTWTGASKYNLNGRESIINPGTAMASHKDDEDKFFPMSGVMIFGKESAGASNTALDNVMITDEEEIKATNPVATERFGTVAVNFQSSSTDPATGDVHAMGALPGMVWQDRDVYLQGPIWAKIPHTDGHFHPSPLMGGFGLKNPPPQILIKNTPVPANPPAEFSATKFASFITQYSTGQVSVEIEWELQKENSKRWNPEVQYTSNYAKSANVDFTVDNNGLYTEPRPIGTRYLTRPL

SEQ ID NO: 756 - protein, 736 aa, synthetic construct
  REGION 1..736: note = source = /note="Description of Artificial Sequence: Synthetic polypeptide"
MAADGYLPDWLEDNLSEGIREWWDLKPGAPKPKANQQKQDDGRGLVLPGYKYLGPFNGLDKGEPVNAADAAALEHDKAYDQQLKAGDNPYLRYNHADAEFQERLQEDTSFGGNLGRAVFQAKKRVLEPLGLVEEGAKTAPGKKRPVEQSPQEPDSSSGIGKTGQQPAKKRLNFGQTGDSESVPDPQPLGEPPATPAAVGPTTMASGGGAPMADNNEGADGVGNASGNWHCDSTWLGDRVITTSTRTWALPTYNNHLYKQISSASTGASNDNHYFGYSTPWGYFDFNRFHCHFSPRDWQRLINNNWGFRPKRLNFKLFNIQVKEVTTNDGVTTIANNLTSTVQVFSDSEYQLPYVLGSAHQGCLPPFPADVFMIPQYGYLTLNNGSQAVGRSSFYCLEYFPSQMLRTGNNFTFSYTFEEAPFHSSYAHSQSLDRLMNPLIDQYLYYLNRTQNQSGSAQNKDLLFSRGSPAGMSVQPKNWLPGPCYRQQRVSKTKTDNNNSNFTWTGASKYNLNGRESIINPGTAMASHKDDEDKFFPMSGVMIFGKESAGASNTALDNVMITDEEEIKATNPVATERFGTVAVNFQSSSTDPATGDVHAMGALPGMVWQDRDVYLQGPIWAKIPHTDGHFHPSPLMGGFGLKNPPPQILIKNTPVPANPPAEFSATKFASFITQYSTGQVSVEIEWELQKENSKRWNPEVQYTSNYAKSANVDFTVDNNGLYTEPRPVGTRYLTRPL

SEQ ID NO: 757 - protein, 736 aa, synthetic construct
  REGION 1..736: note = source = /note="Description of Artificial Sequence: Synthetic polypeptide"
MAADGYLPDWLEDNLSEGIREWWDLKPGAPKPKANQQKQDDGRGLVLPGYKYLGPFNGLDKGEPVNAADAAALEHDKAYDQQLKAGDNPYLRYNHADAEFQERLQENTSFGGNLGRAVFQAKKRVLEPLGLVEEGAKTAPGKKRPVEQSPQEPDSSSGIGKTGQQPAKKRLNFGQTGDSESVPDPQPLGEPPATPAAVGPTTMASGGGAPMADNNEGADGVGNASGNWHCDSTWLGDRVITTSTRTWALPTYNNHLYKQISSASTGASNDNHYFGYSTPWGYFDFNRFHCHFPPRDWQRLINNNWGFRPKRLNFKLFNIQVKEVTSNDGVTTIANNLTSTVQVFSDSEYQLPYVLGSAHQGCLPPFPADVFMIPQYGYLTLNNGSQAVGRSSFYCLEYFPSQMLRTGNNFTFSYTFEEVPFHSSYAHSQSLDRLMNPLIDQYLYYLNRTQNQSGSAQNKDLLFSRGSPAGMSVQPKNWLPGPCYRQQRVSKTKTDNNNSNFTWTGASKYNLNGRESIINPGTAMASHKDDEDKFFPMSGVMIFGKESAGASNTALDNVMITDEEEIKATNPVATERFGTVAVNFQSSSTDPATGDVHAMGALPGMVWQDRDVYLQGPIWAKIPHTDGHFHPSPLMGGFGLKNPPPQILIKNTPVPANPPAEFSATKFASFITQYSTGQVSVEIEWELQKENSKRWNPEVQYTSNYAKSANVDFTVDNNGLYTEPRPIGTRYLTRPL

SEQ ID NO: 758 - protein, 736 aa, synthetic construct
  REGION 1..736: note = source = /note="Description of Artificial Sequence: Synthetic polypeptide"
MAADGYLPDWLEDNLSEGIREWWDLKPGAPKPKANQQKQDDGRGLVLPGYKYLGPFNGLDKGEPVNAADAAALEHDKAYDQQLKAGDNPYLRYNHADAEFQERLQEDTSFGGNLGRAVFQAKKRVLEPLGLVEEGAKTAPGKKRPVEQSPQEPDSSSGIGKTGQQPAKKRLNFGQTGDSESVPDPQPLGEPPATPAAVGPTTMASGGGAPMADNNEGADGVGNASGNWHCDSTWLGDRVITTSTRTWALPTYNNHLYKQISSASTGASNDNHYFGYSTPWGYFDFNRFHCHFSPRDWQRLINNNWGFRPKRLNFKLFNIQVKEVTTNDGVTTIANNLTSTVQVFSDSEYQLPYVLGSAHQGCLPPFPADVFMIPQYGYLTLNNGSQAVGRSSFYCLEYFPSQMLRTGNNFTFSYTFEEVPFHSSYAHSQSLDRLMNPLIDQYLYYLNRTQNQSGSAQNKDLLFSRGSPAGTSVQPKNWLPGPCYRQQRVSKTKTDNNNSNFTWTGASKYNLNGRESIINPGTAMASHKDDEDKFFPMSGVMIFGKESAGASNTALDNVMITDEEEIKATNPVATERFGTVAVNFQSSSTDPATGDVHAMGALPGMVWQDRDVYLQGPIWAKIPHTDGHFHPSPLMGGFGLKNPPPQILIKNTPVPANPPAEFSATKFASFITQYSTGQVSVEIEWELQKENSKRWNPEVQYTSNYAKSANVDFTVDNNGLYTGPRPIGTRYLTRPL

SEQ ID NO: 759 - protein, 736 aa, synthetic construct
  REGION 1..736: note = source = /note="Description of Artificial Sequence: Synthetic polypeptide"
MAADGYLPDWLEDNLSEGIREWWDLKPGAPKPKANQQKQDDGRGLVLPGYKYLGPFNGLDKGEPVNAADAAALEHDKAYDQQLKAGDNPYLRYNHADAEFQERLQEDTSFGGNLGRAVFQAKKRVLEPLGLVEEGAKTAPGKKRPVEQSPQEPDSSSGIGKTGQQPAKKRLNFGQTGDSESVPDPQPLGEPPATPAAVGPTTMASGGGAPMADNNEGADGVGNAPGNWHCDSTWLGDRVITTSTRTWALPTYNNHLYKQISSASTGASNDNHYFGYSTPWGYFDFNRFHCHFSPRDWQRLINNNWGFRPKRLNFKLFNIQVKEVTTNDGVTTIANNLTSTVQVFSDSEYQLPYVLGSAHQGCLPPFPADVFMIPQYGYLTLNNGSQAVGRSSFYCLEYFPSQMLRTGNNFTFSYTFEEVPFHSSYAHSQSLDRLMNPLIDQYLYYLNRTQNQSGSAQNKDLLFSRGSPAGMSVQPKNWLPGPCYRQQRVSKTKTDNNNSNFTWTGASKYNLNGRESIINPGTAMASHKDDEDKFFPMSGVMIFGKESAGASNTALDNVMITGEEEIKATNPVATERFGTVAVNFQSSSTDPATGDVHAMGALPGMVWQDRDVYLQGPIWAKIPHTDGHFHPSPLMGGFGLKNPPPQILIKNTPVPANPPAEFSATKFASFITQYSTGQVSVEIEWELQKENSKRWNPEVQYTSNYAKSANVDFTVDNNGLYTEPRPIGTRYLTRPL

SEQ ID NO: 760 - protein, 736 aa, synthetic construct
  REGION 1..736: note = source = /note="Description of Artificial Sequence: Synthetic polypeptide"
MAADGYLPDWLEDNLSEGIREWWDLKPGAPKPKANQQKQDDGRGLVLPGYKYLGPFNRLDKGEPVNAADAAALEHDKAYDQQLKAGDNPYLRYNHADAEFQERLQEDTSFGGNLGRAVFQAKKRVLEPLGLVEEGAKTAPGRKRPVEQSPQEPDSSSGIGKTGQQPAKKRLNFGQTGDSESVPDPQPLGEPPATPAAVGPTTMASGGGAPMADNNEGADGVGNASGNWHCDSTWLGDRVITTSTRTWALPTYNNHLYKQISSASTGASNDNHYFGYSTPWGYFDFNRFHCHFSPRDWQRLINNNWGFRPKRLNFKLFNIQVKEVTTNDGVTTIANNLTSTVQVFSDSEYQLPYVLGSAHQGCLPPFPADVFMIPQYGYLTLNNGGQAVGRSSFYCLEYFPSQMLRTGNNFTFSYTFEEVPFHSSYAHSQSLDRLMNPLIDQYLYYLNRTQNQSGSAQNKDLLFSRGSPAGMSVQPKNWLPGPCYRQQRVSKTKTDNNNSNFTWTGASKYSLNGRESIINPGTAMASHKDDEDKFFPMGGVMIFGKESAGASNTALDNAMITDEEEIKATNPVATERFGTVAVNFQSSSTDPATGDVHAMGALPGMVWQDRDVYLQGPIWAKIPHTDGHFHPSPLMGGFGLKNPPPQILIKNTPVPANPPAEFSATKFASFITQYSTGQVSVEIEWELQKENSKRWNPEVQYTSNYAKSANVDFTVDNNGLYTEPRPIGTRYLTRPL

SEQ ID NO: 761 - protein, 736 aa, synthetic construct
  REGION 1..736: note = source = /note="Description of Artificial Sequence: Synthetic polypeptide"
MAADGYLPDWLEDNLSEGIREWWDLKPGAPKPKANQQKQDDGRGLVLPGYKYLGPFNGLDKGEPVNAADAAALEHDKAYDQQLKAGDNPYLRYNHADAEFQERLQEDTSFGGNLGRAVFQAKKRVLEPLGLVEEGAKTAPGKKRPVEQSPQEPDSSSGIGKTGQQPAKKRLNFGQTGDSESVPDPQPLGEPPATPAAVGPTTMASGGGAPMADNNEGADGVGNASGNWHCDSTWLGGRVITTSTRTWALPTYNNHLYKQISSASTGASNDNHYFGYSTPWGYFDFNRFHCHFSPRDWQRLINNNWGFRPKRLNFKLFNIQVKEVTTNDGVTTIANNLTSTVQVFSDSEYQLPYVLGSAHQGCLPPFPADVFMIPQYGYLTLNNGSQAVGRSSFYCLEYFPSQMLRTGNNSTFSYTFEEVPFHSSYAHSQSLDRLMNPLIDQYLYYLNRTQNQSGSAQNKDLLFSRGSPAGMSVQPKNWLPGPCYRQQRVSKTKTDNNNSNFTWTGASKYNLNGRESIINPGTAMASHKDDEDKFFPMSGVMIFGKESAGASNTALDNVMITDEEEIKATNPVATERFGTVAVNFQSSSTDPATGDVHAMGTLPGMVWQDRDVYLQGPIWAKIPHTDGHFHPSPLMGGFGLKNPPPQILIKNTPVPANPPAEFSATKFASFITQYSTGQVSVEIEWELQKENSKRWNPEVQYTSNYAKSANVDFTVDNNGLYTEPRPIGTRYLTRPL

SEQ ID NO: 762 - protein, 736 aa, synthetic construct
  REGION 1..736: note = source = /note="Description of Artificial Sequence: Synthetic polypeptide"
MAADGYLPDWLEDNLSEGIREWWDLKPGAPKPKANQQKQDDGRGLVLPGYKYLGPFNGLDKGEPVSAADAAALEHDKAYDQQLKAGDNPYLRYNHADAEFQERLQEDTSFGGNLGRAVFQAKKRVLEPLGLVEEGAKTAPGKKRPVEQSPQEPDSSSGIGKTGQQPAKERLNFGQTGDSESVPDPQPLGEPPATPAAVGPTTMASGGGAPMADNNEGADGVGNASGNWHCDSTWLGDRVITTSTRTWALPTYNNHLYKQISSASTGASNDNHYFGYSTPWGYFDFNRFHCHFSPRDWQRLINNNWGFRPKRLNFKLFNIQVKEVTTNDGVTTIANNLTSTVQVFSDSEYQLPYVLGSAHQGCLPPFPADVFMIPQYGYLTLNNGSQAVGRSSFYCLEYFPSQMLRTGNNFTFSYTFEEVPFHSSYAHSQSLDRLMNPLIDQYLYYLNRTQNQSGSAQNKDLLFSRGSPAGMSVQPKNWLPGPCYRQQRVSKTKTDNNNSNFTWTGASKYNLNGRESIINPGTAMASHKDDEDKFFPMSGVMIFGKESAGASNTALDNVMITDEEEIKATNPVATERFGTVAVNFQSSSTDPATGDVHAMGALPGMVWQDRDVYLQGPIWAKIPHTDGHFHPSPLMGGFGLKNPPPQILIKNTPVPANPPAEFSATKFASFITQYSTGQVSVEIEWELQKENSKRWNPEVQYTSNYAKSANVDFTVDNNGLYTEPRPIGTRYLTRPL

SEQ ID NO: 763 - protein, 736 aa, synthetic construct
  REGION 1..736: note = source = /note="Description of Artificial Sequence: Synthetic polypeptide"
MAADGYLPDWLEDNLSEGIREWWDLKPGAPKPKANQQKQDDGRGLVLPGYKYLGPFNGLDKGEPVNAADAAALEHDKAYDQQLKAGDNPYLRYNHADAEFQERLQEDTSFGGNLGRAVFQAKKRVLEPLGLVEEGAKTAPGKKRPVEQSPQEPDSSSGIGKTGQQPAKKRLNFGQTGDSESVPDPQPLGEPPATPAAVGPTTMASGGGAPMADNNEGADGVGNASGNWHCDSTWLGDRVITTSTRTWALPTYNNHLYKQISSASTGASNDNHYFGYSTPWGYFDFNRFHCHFSPRDWQRLINNNWGFRPKRLNFKLFNIQVKEVTTNDGVTTIANNLTSTVQVFSDSEYQLPYVLGSAHQGCLPPFPADVFMIPQYGYLTLNNGSQAVGRSSFYCLEYFPSQMLRTGNNFTFSYTFEEVPFHSSYAHSQSLDRLMNPLIDQYLYYLNRTQNQSGSAQNKDLLFSRGSPAGMSVQPKNWLPGPCYRQQRVSKTKTDNNNSNFTWTGASKYNLNGRESIINPGTAMASHKDDEDKFFPMSGVMIFGKESAGASNTALDNVMITDEGEIKATNPVATERFGTVAVNFQSSSTDPATGDVHAMGALPGMVWQDRDVYLQGPIWAKIPHTDGHFHPSPLMGGFGLKNPPPQILIKNTPVPANPPAEFSATKFASFITQYSTGQVSVEIEWELQKENSKRWNPEVQYTSNYAKSANVDFTVDNNGLYTEPRPIGTRYLTRPL

SEQ ID NO: 764 - protein, 736 aa, synthetic construct
  REGION 1..736: note = source = /note="Description of Artificial Sequence: Synthetic polypeptide"
MAADGYLPDWLEDNLSEGIREWWDLKPGAPKPKANQQKQDDGRGLVLPGYKYLGPFNGLDKGEPVNAADAAALEHDKAYDQQLKAGDNPYLRYNHADAEFQERLQEDTSFGGNLGRAVFQAKKRVLEPFGLVEEGAKTAPGKKRPVEQSPQEPDSSSGIGKTGQQPAKKRLNFGQTGDSESVPDPQPLGEPPATPAAVGPTTMASGGGAPMADNNEGADGVGNASGNWHCDSTWLGDRVITTSTRTWALPTYNNHLYKQISSASTGASNDNHYFGYSTPWGYFDFNRFHCHFSPRDWQRLINNNWGFRPKRLNFKLFNIQVKEVTTNDGVTTIANNLTSTVQVFSDSEYQLPYVLGSAHQGCLPPFPADVFMIPQYGYLTLNNGSQAVGRSSFYCPEYFPSQMLRTGNNFTFSYTFEEVPFHSSYAHSQSLDRLMNPLIDQYLYYLNRTQNQSGSAQNKDLLFSRGSPAGMSVQPKNWLPGPCYRQQRVSKTKTDNNNSNFTWTGASKYNLNGRESIINPGTAMASHKDDKDKFFPMSGVMIFGKESAGASNTALDNVMITDEEEIKATNPVATERFGTVAVNFQSSNTDPATGDVHVMGALPGMVWQDRDVYLQGPIWAKIPHTDGHFHPSPLMGGFGLKHPPPQILIKNTPVPANPPAEFSATKFASFITQYSTGQVSVEIEWELQKENSKRWNPEVQYTSNYAKSANVDFTVDNNGLYTEPRPIGTRYLTRPL

SEQ ID NO: 765 - protein, 736 aa, synthetic construct
  REGION 1..736: note = source = /note="Description of Artificial Sequence: Synthetic polypeptide"
MAADGYLPDWLEDNLSEGIREWWDLKPGAPKPKANQQKQDDGRGLVLPGYKYLGPFNGLDKGEPVNAADAAALEHDKAYDQQLKAGDNPYLRYNHADAEFQERLQEDTSFGGNLGRAVFQAKKRVLEPFGLVEEGAKTAPGKKRPVEQSPQEPDSSSGIGKTGQQPAKKRLNFGQTGDSESVPDPQPLGEPPATPAAVGPTTMASGGGAPMADNNEGADGVGNASGNWHCDSTWLGDRVITTSTRTWALPTYNNHLYKQISSASTGASNDNHYFGYSTPWGYFDFNRFHCHFSPRDWQRLINNNWGFRPKRLNFKLFNIQVKEVTTNDGVTTIANNLTSTVQVFSDSEYQLPYVLGSAHQGCLPPFPADVFMIPQYGYLTLNNGSQAVGRSSFYCLEYFPSQMLRTGNNFTFSYTFEEVPFHSSYAHSQSLDRLMNPLIDQYLYYLNRTQNQSGSAQNKDLLFSRGSPAGMSVQPKNWLPGPCYRQQRVSKTKTDNNNSNFTWTGASKYNLNGRESIINPGTAMASHKDDKDKFFPMSGVMIFGKESAGASNTALDNVMITDEEEIKATNPVATERFGTVAVNFQSSDTDPATGDVHVMGALPGMVWQDRDVYLQGPIWAKIPHTDGHFHPSPLMGGFGLKHPPPQILIKNTPVPANPPAEFSATKFASFITQYSTGQVSVEIEWELQKENSKRWNPEVQYTSNYAKSANVDFTVDNNGLYTEPRPIGTRYLTRPL

SEQ ID NO: 766 - protein, 736 aa, synthetic construct
  REGION 1..736: note = source = /note="Description of Artificial Sequence: Synthetic polypeptide"
MAADGYLPDWLEDNLSEGIREWWDLKPGAPKPKANQQKQGDGRGLVLPGYKYLGPFNGLDKGEPVNAADAAALEHDKAYDQQLKAGDNPYLRYNHADAEFQERLQEDTSFGGNLGRAVFQAKKRVLEPFGLVEEGAKTAPGKKRPVEQSPQEPDSSSGIGKTGQQPAKKRLNFGQTGDSESVPDPQPLGEPPATPAAVGPTTMASGGGAPMADNNEGADGVGNASGNWHCDSTWLGDRVITTNTRTWALPTYNNHLYKQISSASTGASNDNHYFGYSTPWGYFDFNRFHCHFSPRDWQRLINNNWGFRPKRLNFKLFNIQVKEVTTNDGVTTIANNLTSTVQVFSDSEYQLPYVLGSAHQGCLPPFPADVFMIPQYGYLTLNNGSQAVGRSSFYCLEYFPSQMLRTGNNFTFSYTFEEVPFHSSYGHSQSLDRLMNLLIDQYLYYLNRTQNQSGSAQNKDLLFSRGSPAGMFVQPKNWLPGPCYRQQRVSKTKTDNNNSNFTWTGASKYNLNGRESIINPGTAMASHKDDEDKFFPMSGVMIFGKESAGASNTALDNVMITDEEEIKATNPVATERFGTVAVNFQSSSTDPATGDVHVMGALPGMVWQDRDVYLQGPIWAKIPHTDGHFHPSPLMGGFGLKHPPPQILIKNTPVPANPPAEFSATKFASFITQYSTGQVSVEIEWELQKENSKRWNPEVQYTSNYAKSANVDFTVDNNGLYTEPRPIGTRYLTRPL

SEQ ID NO: 767 - protein, 736 aa, synthetic construct
  REGION 1..736: note = source = /note="Description of Artificial Sequence: Synthetic polypeptide"
MAADGYLPDWLEDNLSEGIREWWDLKPGAPKPKANQQKQDDGRGLVLPGYKYLGPFNGLDKGEPVNAADAAALEHDKAYDQQLKAGDNPYLRYNHADAEFQERLQEDTSFGGNLGRAVFQAKKRVLEPFGLVEEGAKTAPGKKRPVEQSPQEPDSSSGIGKTGQQPAKKRLNFGQTGDSESVPDPQPLGEPPATPAAVGPTTMASGGGAPMADNNEGADGVGNASGNWHCDSTWLGDRVITTNTRTWALPTYNNHLYKQISSASTGASNDNHYFGYSTPWGYFDFNRFHCHFSPRDWQRLINNNWGFRPKRLNFKLFNIQVKEVTTNDGVTTIANNLTSTVQVFSDSEYQLPYVLGSAHQGCLPPFPADVFMIPQYGYLMLNNGSQAVGRSSFYCLEYFPSQMLRTGNNFTFSYTFEEVPFHSSYAHSQSLDRLMNPLIDQYLYYLNRTQNQSGSAQNKDLLFSRGSPAGMSVQPKNWLPGPCYRQQRVSKTKTDNNNSNFTWTGASKYNLNGRESIINPGTAMASHKDDEDKFFPMSGVMIFGKESAGASNTALDNVMITDEEEIKATNPAATERFGTVAVNFQSSSTDPATGDVHVMGALPGMVWQDRDVYLQGPIWAKIPHTDGHFHPSPLMGGFGLKHPPPQILIKNTPVPANPPAEFSATKFASFITQYSTGQVSVEIEWELQKENSKRWNPEVQYTSNYAKSANVDFTVDNNGLYTEPRPIGTRYLTRPL

SEQ ID NO: 768 - protein, 736 aa, synthetic construct
  REGION 1..736: note = source = /note="Description of Artificial Sequence: Synthetic polypeptide"
MAADGYLPDWLEDNLSEGIREWWDLKPGAPKPKANQQKQDDGRGLVLPGYKYLGPFNGLDKGEPVNAADAAALEHDKAYDQQLKAGDNPYLRYNHADAEFQERLQEDTSFGGNLGRAVFQAKKRVLEPFGLVEEGAKTAPGKKRPVEQSPQEPDSSSGIGKTGQQPAKKRLNFGQTGDSESVPDPQPLGEPPATPAAVGPTTMASGGGAPMADNNEGADGVGNASGNWHCDSTWLGDRVITTSTRTWALPTYNNHLYKQISSASTGASNDNHYFGYSTPWGYFDFNRFHCHFSPRDWQRLINNNWGFRPKRLNFKLFNIQVKEVTTNDGVTTIANNLTSTVQVFSDSEYQLPYVLGSAHQGCLPPFPADVFMIPQYGYLTLNNGSQAVGRSSFYCLEYFPSQMLRTGNNFTFSYTFEEVPFHSSYAHSQSLDRLMNPLIDQYLYYLNRTQNQSGSAQNKDLLFSRGSPAGMSVQPKNWLPGPCYRQQRVSKTKTDNNNSNFTWTGASKYNLNGRESIINPGTAMASHKDDEDKFFPMSGVMIFGKESAGASNTALDNVMITDEEEIKATNPVATERFGTVAVNFQSSSTDPATGDVHVMGALPGMVWQDRDVYLQGPIWAKIPHTDGHFHPSPLMGGFGLKHPPPQILIKNTPVPANPPAEFSATKFASFITQYSTGQVSVEIEWELQKENSKRWNPEVQYTSNYAKSANVDFTVDNNGLYTEPRPIGTRYLTRPL

SEQ ID NO: 769 - protein, 736 aa, synthetic construct
  VARIANT 102: note = MOD_RES - Any amino acid
  REGION 1..736: note = source = /note="Description of Artificial Sequence: Synthetic polypeptide"
MAADGYLPDWLEDNLSEGIREWWDLKPGAPKPKANQQKQDDGRGLVLPGYKYLGPFNGLDKGEPVNAADAAALEHDKAYDQQLKAGDNPYLRYNHADAEFQXRLQEDTSFGGNLGRAVFQAKKRVLEPFGLVEEGAKTAPGKKRPVEQSPQEPDSSSGIGKTGQQPAKKRLNFGQTGDSESVPDPQPLGEPPATPAAVGPTTMASGGGAPMADNNEGADGVGNASGNWHCDSTWLGGRVITTSTRTWALPTYNNHLYKQISSASTGASNDNHYFGHSTPWGYFDFNRFHCHFSPRDWQRLINNNWGFRPKRLNFKLFNIQVKEVTTNDGVTTIANNLTSTVQVFSDSEYQLPYVLGSAHQGCLPPSPADVFMIPQYGYLTLNNGSQAVGRSSFYCLEYFPSQMLRTGNNFTFSYTFEEVPFHSSYAHSQSLDRLMNPLIDQYLYYLNRTQNQSGSAQNKDLLFSRGSPAGMSVQPKNWLPGPCYRQQRVSKTKTDNNNSNFTWTGASKYNLNGRESIINPGTAMASHKDDKDKFFPMSGVMIFGKESAGASNTALDNVMITDEEEIKATNPVATERFGTVAVNFQSSNTDPATGDVHVMGALPGMVWQDRDVYLQGPIWAKIPHTDGHFHPSPLMGGFGLKHPPPQILIKNTPVPANPPAEFSATKFASFITQYSTGQVSVEIEWELQKENSKRWNPEVQYTSNYAKSANVDFTVDNNGLYTEPRPIGTRYLTRPL

SEQ ID NO: 770 - protein, 736 aa, synthetic construct
  REGION 1..736: note = source = /note="Description of Artificial Sequence: Synthetic polypeptide"
MAADGYFPDWLEDNLSEGIREWWDLKPGAPKPKANQQKQDDGRGLVLPGYKYLGPFNGLDKGEPVNAADAAALEHDKAYDQQLKAGDNPYLRYNHADAEFQERLQEDTSFGGNLGRAVFQAKKRVLEPFGLVEEGAKTAPGKKRPVEQSPQEPDSSSGIGRTGQQPAKKRLNFGQTGDSESVPDPQPLGEPPATPAAVGPTTMASGGGAPMADNNEGADGVGNASGNWHCDSTWLGDRVITTSTRTWALPTYNNHLYKQISSASTGASNDNHYFGYSTPWGYFDFNRFHCHFSPRDWQRLINNNWGFRPKRLNFKLFNIQVKEVTTNDGVTTIANNLTSTVQVFSDSEYQLPYVLGSAHQGCLPPFPADVFMIPQYGYLTLNNGSQAVGRSSFYCLEYFPSQMLRTGNNFTFSYTFEEVPFHSSYAHSQSLDRLMNPLIDQYLYYLNRTQNQSGSAQNKDLLFSRGSPAGMSVQPKNWLPGPCYRQQRVSKTKTDNNNSNFTWTGASKYNLNGRESIINPGTAMASHKDDEDKFFPMSGVMIFGKESAGASNTALDNVMITDEEEIKATNPVATERFGTVAVNFQSSSPDPATGDVHVMGALPGMVWQDRDVYLQGPIWAKIPHTDGHFHPSPLMGGFGLKHPPPQILIKNTPVPANPPAEFSATKFASFITQYSTGQVSVEIEWELQKENSKRWNPEVQYTSNYAKSANVDFTVDNNGLYSEPRPIGTRYLTRPL

SEQ ID NO: 771 - protein, 736 aa, synthetic construct
  REGION 1..736: note = source = /note="Description of Artificial Sequence: Synthetic polypeptide"
MAADGYLPDWLEDNLSEGIREWWDLKPGAPKPKANQQKQDDGRGLVLPGYKYLGPFNGLDKGEPVNAADAAALEHDKAYDQQLKAGDNPYLRYNHADAEFQERLQEDTSFGGNLGRAVFQAKKRVLEPFGLVEEGAKTAPGKKRPVEQSPQEPDSSSGIGKTGQQPAKKRLNFGQTGDSESVPDPQPLGEPPATPAAVGPTTMASGGGAPMADNNEGADGVGNASGNWHCDSTWLGDRVITTSTRTWALPTYNNHLYKQTSSASTGASNDNHYFGYSTPWGYFDFNRFHCHFSPRDWQRLINNNWGFRPKRLNFKLFNIQVKEVTTNDGVTTIANNLTSTVQVFSDSEYQLPYVLGSAHQGCLPPFPADVFMIPQYGYLTLNNGSQAVGRSSFYCLEYFPSQMLRTGNNFTFSYTFEEVPFHSSYAHSQSLDRLMNPLIDQYLYYLNRTQNQSGSAQNKDLLFSRGSPAGMSVQPKNWLPGPCYRQQRVSKTKTDYNNSNFTWTGASKYNLNGRESIINPGTAMASHKDDEDKFFPMSGVMIFGKESAGASNTALDNVMITDEEEIKATNPVATERFGTVAVNFQSSSTDPATGDVHVMGALPGMVWQDRDVYLQGPIWAKIPHTDGHFHPSPLMGGFGLKHPPPQILIKNTPVPANPPAEFSATKFASFITQYSTGQVSVEIEWELQKENSKRWNPEVQYTSNYAKSANVDFTVDNNGLYTEPRPIGTRYLTRPL

SEQ ID NO: 772 - protein, 736 aa, synthetic construct
  REGION 1..736: note = source = /note="Description of Artificial Sequence: Synthetic polypeptide"
MAADGYPPDWLEDNLSEGIREWWDLKPGVPKPKANQQKQDDGRGLVLPGYKYLGPFNGLDKGEPVNAADAAALEHDKAYDQQLKAGDNPYLRYNHADAEFQERLQEDTSFGGNLGRAVFQAKKRVLEPFGLVEEGAKTAPGKKRPVEQSPQEPDSSSGIGKTGQQPAKKRLNFGQTGDSESVPDPQPLGEPPATPAAVGPTTMASGGGAPMADNNEGADGVGNASGNWHCDSTWLGDRVITTSTRTWALPTYNNHLYKQISSASTGASNDNHYFGYSTPWGYFDFNRFHCHFSPRDWQRLINNNWGFRPKRLNFKLFNIQVKEVTTNDGVTTIANNLTSTVQVFSDSEYQLPYVLGSAHQGCLPPFPADVFMIPQYGYLTLNNGSQAVGRSSFYCLEYFPSQMLRTGNNFTFSYTFEEVPFHSSYAHSQSLDRLMNPLIDQYLYYLNRTQNQSGSAQNKDLLFSRGSPAGMSVQPKNWLPGPCYRQQRVSKTKTDNNNSNFTWTGASKYNLNGRESIINPGTAMASHKDDEDKFFPMSGVMIFGKESAGASNTALDNVMITDEEEIKATNPVATERFGTVAVNFQSSSTDPATGDVHVMGALPGMVWQDRDVYLQGPIWAKIPHTDGHFHPSPLMGGFGLKHPPPQILIKNTPVPANPPAEFSATKFASFITQYSTGQVSVEIEWELQKENSKRWNPEVQYTSNYAKSANVDFTVDNNGLYTEPRPIGTRYLTRPL

SEQ ID NO: 773 - protein, 732 aa, synthetic construct
  REGION 1..732: note = source = /note="Description of Artificial Sequence: Synthetic polypeptide"
MAADGYLPDWLEDNLSEGIREWWDLKPGAPKPKANQQKQDDGRGLVLPGYKYLGPFNGLDKGEPVNAADAAALEHDKAYDQQLKAGDNPYLRYNHADAEFQERLQEDTSFGGNLGRAVFQAKKRVLEPFGLVEEGAKTAPGKKRPVEQSPQEPDSSSGIGKTGQQPAKKRLNFGQTGDSESVPDPQPLGEPPATPAAVGPTTMASGGGAPMADNNEGADGVGNASGNWHCDSTWLGDRVITTSTRTWALPTYNNHLYKQISSASTGASNDNHYFGYSTPWGYFDFNRFHCHFSPRDWQRLINNNWGFRPKRLNFKLFNIQVKEVTTNDGVTTIANNLTSTVQAFSDSEYQLPYVLGSAHQGCLPPFPADVFMIPQYGYLTLNNGSQAVGRSSFYCLEYFPSQMLRTGNNFTFSYTFEEVPFHSSYAHSQSLDRLMNPLIDPYLYYLNRTQNQSGSAQNKDLLFSRGSPAGMSVQPKNWLPGPCYRQQRVSKTKTDNNNSNFTWTGASKYNLNGRESIINPGTAMASHKDDEDKFFPMSGVMIFGKESAGASNTALDNVMITDEEEIKATNPVATERFGTVAVNFQSSSTDPATGDVHVMGALPGMVWQDRDVYLQGPIWAKIPHTDGHFHPSPLMGGFGLKHPPPQILIKNTPVPANPPAEFSATKFASFITQYSTGQVSVEIEWELQKENSKRWNPEVQYTSNYAKSANVDFTVDNNGLYTEPRPIGTRYL

SEQ ID NO: 774 - protein, 736 aa, synthetic construct
  REGION 1..736: note = source = /note="Description of Artificial Sequence: Synthetic polypeptide"
MAADGYLPDWLEDNLSEGIREWWDLKPGAPKPKANQQKQDDGRGLVLPGYKYLGPFNGLDKGEPVNAADAAALEHDKAYDQQLKAGDNPYLRYNHADAEFQERLQEDTSFGGNLGRAVFQAKKRVLEPFGLVEEGAKTAPGKKRPVEQSPQEPDSSSGIGKTGQQPAKKRLNFGQTGDSESVPDPQPLGEPPATPAAVGPTTMASGGGAPMADNNEGADGVGNASGNWHCDSTWLGDRVITTSTRTWALPTYNNHLYKQISSASTGASNDNHYFGYSTPWGYFDFNRFHCHFSPRDWQRLINNNWGFRPKRLNFKLFNIQVKEVTTNDGVTTIANNLTSTVQVFSDSEYQLPYVLGSAHQGCLPPFPADVFMIPQYGYLTLNNGSQAVGRSSFYCLEYFPSQMLRTGNNFTFSYTFEEVPFHSSYAHSQSLDRLMNPLIDQYLYYLNRTQNQSGSAQNKDLLFSRGSPAGMSVQPKNWLPGPCYRQQRVSKTKTDNNNSNFTWTGASKYNLNGRESIINPGTAMASHKDDEDKFFPMSGVMIFGKESAGASNTALDNVMITDEEEIKATNPVATERFGTVAVNFQSSSTDPATGDVHVMGALPGMVWQDRDVYLQGPIWAKIPHTDGHSHPSPLMGGFGLKHPPPQILIKNTPVPANPPAEFSATKFASFITQYSTGQVSVEIEWELQKENSKRWNPEVQYTSNYAKSANVDFTVDNNGLYTEPRPIGTRYLTRPL

SEQ ID NO: 775 - protein, 736 aa, synthetic construct
  REGION 1..736: note = source = /note="Description of Artificial Sequence: Synthetic polypeptide"
MAADGYLPDWLEDNLSEGIREWWDLKPGAPKPKANQQKQDDGRGLVLPGYKYLGPFNGLDKGEPVNAADAAALEHDKAYDQQLKAGDNPYLRYNHADAEFQERLQEDTSFGGNLGRAVFQAKKRVLEPFGLVEEGAKTAPGKKRPVEQSPQEPDSSSGIGKTGQQPAKKRLNFGQTGDSESVPDPQPLGEPPATPAAVGPTTMASGGGAPMADNNEGADGVGNASGNWHCDSTWLGDRVITTSTRTWALPTYNNHLYKQISSASTGASNDNHYFGYSTPWGYFDFNRFHCHFSPRDWQRLINNNWGFRPKRLNFKLFNIQVKEVTTNDGVTTIANNLTSTVQVFSDSEYQLPYVLGSAHQGCLPPFPADVFMIPQYGYLTLNNGSQAVGRSSFYCLEYFPSQMLRTGNNFTFSYTFEEVPFHSSYAHSQSLDRLMNPLIDLYLYYLNRTQNQSGSAQNKDLLFSRGSPAGMSVQPKNWLPGPCYRQQRVSKTKTDNNNSNFTWTGASKYNLNGRESIINPGTAMASHKDDEDKFFPMSGVMIFGKESAGTSNTALDNVMITDEEEIKATNPVATERFGTVAVNFQSSSTDPATGDVHVMGALPGMVWQDRDVYLQGPIWAKIPHTDGHFHPSPLMGGFGLKHPPPQILIKNTPVPANPPAEFSATKFASFITQYSTGQVSVEIEWELQKENSKRWNPEVQYTSNYAKSANVDFTVDNNGLYTEPRPIGTRYLTRPL

SEQ ID NO: 776 - protein, 736 aa, synthetic construct
  REGION 1..736: note = source = /note="Description of Artificial Sequence: Synthetic polypeptide"
MAADGYLPDWLEDSLSEGIREWWDLKPGAPKPKANQQKQDDGRGLVLPGYKYLGPFNGLDKGEPVNAADAAALEHDKAYDQQLKAGDNPYLRYNHADAEFQERLQEDTSFGGNLGRAVFQAKKRVLEPFGLVEEGAKTAPGKKRPVEQSPQEPDSSSGIGKTGQQPAKKRLNFGQTGDSESVPDPQPLGEPPATPAAVGPTTMASGGGAPMADNNEGADGVGNASGNWHCDSTWLGDRVITTSTRTWALPTYNNHLYKQISSASTGASNDNHYFGYSTPWGYFDFNRFHCHFSPRDWQRLINNNWGFRPKRLNFKLFNIQVKEVTTNDGVTTIANNLTSTVQVFSDSEYQLPYVLGSAHQGCLPPFPADVFMIPQYGYLTPNNGSQAVGRSSFYCLEYFPSQMLRTGNNFTFSYTFEEVPFHSSYAHSQSLDRLMNPLIDQYQYYLNRTQNQSGSAQNKDLLFSRGSPAGMSVQPKNWLPGPCYRQQRVSKTKTDNNNSNFTWTGASKYNLNGRESIINPGTAMASHKDDEDKFFPMSGVMIFGKESAGASNTALDNVMITDEEEIKATNPVATERFGTVAVNFQSSSTDPATGDVHVMGALPGMVWQDRDVYLQGPIWAKIPHTDGHFHPSPLMGGFGLKHPPPQILIKNTPVPANPPAEFSATKFASFITQYSTGQVSVEIEWELQKENSKRWNPEVQYTSNYAKSANVDFTVDNNGLYTEPRPIGTRYLTRPL

SEQ ID NO: 777 - protein, 736 aa, synthetic construct; identical to SEQ ID NO: 768
  REGION 1..736: note = source = /note="Description of Artificial Sequence: Synthetic polypeptide"

SEQ ID NO: 778 - protein, 735 aa, synthetic construct
  REGION 1..735: note = source = /note="Description of Artificial Sequence: Synthetic polypeptide"
MAADGYLPDWLEDTLSEGIRQWWKLKPGPPPPKPAERHKDDSRGLVLPGYKYLGPFNGLDKGEPVNEADAAALEHDKAYDRQLDSGDNPYLKYNHADAEFQERLKEDTSFGGNLGRAVFQAKKRVLEPLGLVEEPVKTAPGKKRPVEHSPVEPDSSSGTGKAGQQPARKRLNFGQTGDADSVPDPQPLGQPPAAPSGLGTNTMATGSGAPMADNNEGADGVGNSSGNWHCDSTWMGDRVITTSTRTWALPTYNNHLYKQISSQSGASNDNHYFGYSTPWGYFDFNRFHCHFSPRDWQRLINNNWGFRPKRLNFKLFNIQVKEVTQNDGTTTIANNLTSTVQVFTDSEYQLPYVLGSAHQGCLPPFPADVFMVPQYGYLTLNNGSQAVGRSSFYCLEYFPSQMLRTGNNFTFSYTFEDVPFHSSYAHSQSLDRLMNPLIDQYLYYLSRTNTPSGTTTQSRLQFSRAGASDIRDQSRNWLPGPCYRQQRVSKTSADNNNSEYSWTGATKYHLNGRDSLVNPGPAMASHKDDEEKFFPQSGVLIFGKQGSEKTNVDIEKVMITDEEEIRTTNPVATEQYGSVSTNLQRGNRQAATADVNTQGVLPGMVWQDRDVYLQGPIWAKIPHTDGHFHPSPLMGGFGLKHPPPQILIKNTPVPANPSTTFSAAKFASFITQYSTGQVSVEIEWELQKENSKRWNPEIQYTSNYNKSVNVDFTVDTNGVYSEPRPIGTRYLTRNL

SEQ ID NO: 779 - DNA, 2211 bp, synthetic construct
  misc_feature 1..2211: note = source = /note="Description of Artificial Sequence: Synthetic polynucleotide"
  source 1..2211: mol_type = other DNA
atggctgctgacggttatcttccagattggctcgaggacaacctttctgaaggcattcgtgagtggtgggctctgaaacctggagtccctcaacccaaagcgaaccaacaacaccaggacaaccgtcggggtcttgtgcttccgggttacaaatacctcggacccggtaacggactcgacaaaggagagccggtcaacgaggcggacgcggcagccctcgaacacgacaaagcttacgaccagcagctcaaggccggtgacaacccgtacctcaagtacaaccacgccgacgccgagtttcaggagcgtcttcaagaagatacgtcttttgggggcaaccttggcagagcagtcttccaggccaaaaagaggatccttgagcctcttggtctggttgaggaagcagctaaaacggctcctggaaagaagaggcctgtagatcagtctcctcaggaaccggactcatcatctggtgttggcaaatcgggcaaacagcctgccagaaaaagactaaatttcggtcagactggcgactcagagtcagtcccagaccctcaacctctcggagaaccaccagcagcccccacaagtttgggatctaatacaatggcttcaggcggtggcgcaccaatggcagacaataacgagggtgccgatggagtgggtaattcctcaggaaattggcattgcgattcccaatggctgggcgacagagtcatcaccaccagcaccagaacctgggccctgcccacttacaacaaccatctctacaagcaaatctccagccaatcaggagcttcaaacgacaaccactactttggctacagcaccccttgggggtattttgactttaacagattccactgccacttctcaccacgtgactggcagcgactcattaacaacaactggggattccggcccaagaaactcagcttcaagctcttcaacatccaagttaaagaggtcacgcagaacgatggcacgacgactattgccaataaccttaccagcacggttcaagtgtttacggactcggagtatcagctcccgtacgtgctcgggtcggcgcaccaaggctgcctcccgccgtttccagcggacgtcttcatggtccctcagtatggatacctcaccctgaacaacggaagtcaagcggtgggacgctcatccttttactgcccggagtacttcccttcgcagatgctaaggactggaaataacttccaattcagctataccttcgaggatgtaccttttcacagcagctacgctcacagccagagtttggatcgcttgatgaatcctcttattgatcagtatctgtactacctgaacagaacgcaaggaacaacctctggaacaaccaaccaatcacggctgctttttagccaggctgggcctcagtctatgtctttgcaggccagaaattggctacctgggccctgctaccggcaacagagactttcaaagactgctaacgacaacaacaacagtaactttccttggacagcggccagcaaatatcatctcaatggccgcgactcgctggtgaatccaggaccagctatggccagtcacaaggacgatgaagaaaaatttttccctatgcacggcaatctaatatttggcaaagaagggacaacggcaagtaacgcagaattagataatgtaatgattacggatgaagaagagattcgtaccaccaatcctgtggcaacagagcagtatggaactgtggcaaataacttgcagagctcaaatacagctcccacgactagaactgtcaatgatcagggggccttacctggcatggtgtggcaagatcgtgacgtgtaccttcaaggacctatctgggcaaagattcctcacacggatggacactttcatccttctcctctgatgggaggctttggactgaaacatccgcctcctcaaatcatgatcaaaaatactccggtaccggcaaatcctccgacgactttcagcccggccaagtttgcttcatttatcactcagtactccactggacaggtcagcgtggaaattgagtgggagctacagaaagaaaacagcaaacgttggaatccagagattcagtacacttccaactacaacaagtctgttaatgtggactttactgtagacactaatggtgtttatagtgaacctcaccctattggaacccggtatctcacacgaaacttgtaa

SEQ ID NO: 780 - DNA, 2211 bp, synthetic construct
  misc_feature 1..2211: note = source = /note="Description of Artificial Sequence: Synthetic polynucleotide"
  source 1..2211: mol_type = other DNA
atggctgctgatggttatcttccagattggctcgaggacaacctttctgaaggcattcgtgagtggtgggctctgaaacctggagtccctcaacccaaagcgaaccaacaacaccaggacaaccgtcggggtcttgtgcttccgggttacaaatacctcggacccggtaacggactcgacaaaggagagccggtcaacgaggcggacgcggcagccctcgaacacgacaaagcttacgaccagcagctcaaggccggtgacaacccgtacctcaagtacaaccacgccgacgccgagtttcaggagcgtcttcaagaagatacgtcttttgggggcaaccttggcagagcagtcttccaggccaaaaagaggatccttgagcctcttggtctggttgaggaagcagctaaaacggctcctggaaagaagaggcctgtagatcagtctcctcaggaaccggactcatcatctggtgttggcaaatcgggcaaacagcctgccagaaaaagactaaatttcggtcagactggcgactcagagtcagtcccagaccctcaacctctcggagaaccaccagcagcccccacaagtttgggatctaatacaatggcttcaggcggtggcgcaccaatggcagacaataacgagggtgccgatggagtgggtaattcctcaggaaattggcattgcgattcccaatggctgggcgacagagtcatcaccaccagcaccagaacctgggccctgcccacttacaacaaccatctctacaagcaaatctccagccaatcaggagcttcaaacgacaaccactactttggctacagcaccccttgggggtattttgactttaacagattccactgccacttctcaccacgtgactggcagcgactcattaacaacaactggggattccggcccaagaaactcagcttcaagctcttcaacatccaagttaaagaggtcacgcagaacgatggcacgacgactgttgccaataaccttaccagcacggttcaagtgtttacggactcggagtatcaactcccgtacgtgctcgggtcggcgcaccaaggctgtctcccgccgtttccagcggacgtcttcatggtccctcagtatggatacctcaccctgaacaacggaagtcaagcggtgggacgctcatccttttactgcctggagtacttcccttcgcagatgctaaggactggaaataacttccaattcagctataccttcgaggatgtaccttttcacagcagctacgctcacagccagagtttggatcgcttgatgaatcctcttattgatcagtatctgtactacctgaacagaacgcaaggaacaacctctggaacaaccaaccaatcacggctgctttttagccaggctgggcctcagtctatgtctttgcaggccagaaattggctacctgggccctgctaccggcaacagagactttcaaagactgctaacgacaacaacaacagtaactttccttggacagcggccagcaaatatcatctcaatggccgcgactcgctggtgaatccaggaccagctatggccagtcacaaggacgatgaagaaaaatttttccctatgcacggcaatctaatatttggcaaagaagggacaacggcaagtaacgcagaattagataatgtaatgattacggatgaagaagagattcgtaccaccaatcctgtggcaacagagcagtatggaactgtggcaaataacttgcagagctcaaatacagctcccacgactagaactgtcaatgatcagggggccttacctggcatggtgtggcaagatcgtgacgtgtaccttcaaggacctatctgggcaaagattcctcacacggatggacactttcatccttctcctctgatgggaggctttggactgaaacatccgcctcctcaaatcatgatcaaaaatactccggtaccggcaaatcctccgacgactttcagcccggccaagtttgcttcatttatcactcagtactccactggacaggtcagcgtggaaattgagtgggagctacagaaagaaaacagcaaacgttggaatccagagattcagtacacttccaactacaacaagtctgttaatgtggactttactgtagacactaatggtgtttatagtgaacctcgccctattggaacccggtatctcacacgaaacttgtaa

SEQ ID NO: 781 - DNA, 2211 bp, synthetic construct
  misc_feature 1..2211: note = source = /note="Description of Artificial Sequence: Synthetic polynucleotide"
  source 1..2211: mol_type = other DNA
atggctgctgacggttatcttccagattggctcgaggacaacctttctgaaggcattcgtgagtggtgggctctgaaacctggagtccctcaacccaaagcgaaccaacaacaccaggacaaccgtcggggtcttgtgcttccgggttacaaatacctcggacccggtaacggactcgacaaaggagagccggtcaacgaggcggacgcggcagccctcgaacacgacaaagcttacgaccagcagctcaaggccggtgacaacccgtacctcaagtacaaccacgccgacgccgagtttcaggagcgtcttcaagaagatacgtcttttgggggcaaccttggcagagcagtcttccaggccaaaaagaggatccttgagcctcttggtctggttgaggaagcagctaaaacggctcctggaaagaagaggcctgtagatcagtctcctcaggaaccggactcatcatctggtgttggcaaatcgggcaaacagcctgccagaaaaagactaaatttcggtcagactggcgactcagagtcagtcccagaccctcaacctctcggagaaccaccagcagcccccacaagtttgggatctaatacaatggcttcaggcggtggcgcaccaatggcagacaataacgagggtgccgatggagtgggtaattcctcaggaaattggcattgcgattcccaatggctgggcgacagagtcatcaccaccagcaccagaacctgggccctgcccacttacaacaaccatctctacaagcaaatctccggccaatcaggagcttcaaacgacaaccactactttggctacagcaccccttgggggtattttgactttaacagattccactgccacttctcaccacgtgactggcagcgactcattaacaacaactggggattccggcccaagaaactcagcttcaagctcttcaacatccaagttaaagaggtcacgcagaacgatggcacgacgactattgccaataaccttaccagcacggttcaagtgtttacggactcggagtatcagctcccgtacgtgctcgggtcggcgcaccaaggctgtctcccgccgtttccagcggacgtcttcatggtccctcagtatggatacctcaccctgaacaacggaagtcaagcggtgggacgctcatccttttactgcctggagtacttcccttcgcagatgctaaggactggaaataacttccaattcagctataccttcgaggatgtaccttttcacagcagctacgctcacagccagagtttggatcgcttgatgaatcctcttattgatcagtatctgtactacctgaacagaacgcaaggaacaacctctggaacaaccaaccaatcacggctgctttttagccaggctgggcctcagtctatgtctttgcaggccagaaattggctacctgggccctgctaccggcaacagagactttcaaagactgctaacggcaacaacaacagtaactttccttggacagcggccagcaaatatcatctcaatggccgcgactcgctggtgaatccaggaccagctatggccagtcacaaggacgatgaagaaaaatttttccctatgcacggcaatctaatatttggcaaagaagggacaacggcaagtaacgcagaattagataatgtaatgattacggatgaagaagagattcgtaccaccaatcctgtggcaacagagcagtgtggaactgtggcaaataacttgcagagctcaaatacagctcccacgactagaactgtcaatgatcagggggccttacctggcatggtgtggcaagatcgtgacgtgtaccttcaaggacctatctgggcaaagattcctcacacggatggacactttcatccttctcctctgatgggaggctttggactgaaacatccgcctcctcaaatcatgatcaaaaatactccggtaccggcaaatcctccgacgactttcagcccggccaagtttgcttcatttatcactcagtactccactggacaggtcagcgtggaaattgagtgggagctacagaaagaaaacagcaaacgttggaatccagagattcagtacacttccaactacaacaagtctgttaatgtggactttactgtagacactaatggtgtttatagtgaacctcgccctattggaacccggtatctcacacgaaacttgtaa

SEQ ID NO: 782 - DNA, 2212 bp, synthetic construct
  misc_difference 1283: note = modified_base - a, c, t, or g
  misc_feature 1..2212: note = source = /note="Description of Artificial Sequence: Synthetic polynucleotide"
  source 1..2212: mol_type = other DNA
atggctgctgacggttatcttccagattggctcgaggacaacctttctgaaggcattcgtgagtggtgggctctgaaacctggagtccctcaacccaaagcgaaccaacaacaccaggacaaccgtcggggtcttgtgcttccgggttacaaatacctcggaccgggtaacggactcgacaaaggagagccggtcaacgaggcggacgcggcagccctcgaacacgacaaagcttacgaccagcagctcaaggccggtgacaacccgtacctcaagtacaaccacgccgacgccgagtttcaggagcgtcttcaagaagatacgtcttttgggggcaaccttggcagagcagtcttccaggccaaaaagaggatccttgagcctcttggtctggttgagggagcagctaaaacggctcctggaaagaagaggcctgtagatcagtctcctcaggaaccggactcatcatctggtgttggcaaatcgggcaaacagcctgccagaaaaagactaaatttcggtcagactggcgactcagagtcagtcccagaccctcaacctctcggagaaccaccagcagcccccacaagtttgggatctaatacaatggcttcaggcggtggcgcaccaatggcagacaataacgagggtgccgatggagtgggtaattcctcaggaaattggcattgcgattcccaatggctgggcgacagagtcatcaccaccagcaccagaacctgggccctgcccacttacaacagccatctctacaagcaaatctccagccaatcaggagcttcaaacgacaaccactactttggctacagcaccccttgggggtattttgactttaacagattccactgccacttctcaccacgtgactggcagcgactcattaacaacaactggggattccggcccaagaaactcagcttcaagctcttcaacatccaagttaaagaggtcacgcagaacgatggcacgacgactattgccaataaccttaccagcacggtccaagtgtttacggactcggagtatcagctcccgtacgtgctcgggtcggcgcaccaaggctgtctcccgccgtttccagcggacgccttcatggtccctcagtatggatacctcaccctgaacaacggaagtcaagcggtgggacgctcatccttttactgcctggagtacttcccttcgcagatgctaaggactggaaataacttccaattcagctataccttcgaggatgtaccttttcacggcagctacgctcacagccngagtttggatcgcttgatgaatcctcttattgatcagtatctgtactacctgaacagaacgcaaggaacaacctctggaacaaccaaccaatcacggctgctttttagccaggctgggcctcagtctatgtctttgcaggccagaaattggctacctgggccctgctaccggcaacagagacttttcaaagactgctaacgacaacaacaacagtaactttccttggacagcggccagcaaatatcatctcaatggccgcgactcgctggtgaatccaggaccagctatggccagtcacaaggacgatgaagaaaaatttttccctatgcacggcaatctaatatttggcaaagaagggacaacggcaagtaacgcagaattagataatgtaatgattacggatgaagaagagattcgtaccaccaatcctgtggcaacagagcagtatggaactgtggcaaataacttgcagagctcaaatacagctcccacgactagaactgtcaatgatcagggggccttacctggcatggtgtggcaagatcgtgacgtgtaccttcaaggacctatctgggcaaagattcctcacacggatggacactttcatccttctcctctgatgggaggctttggactgaaacatccgcctcctcaaatcatgatcaaaaatactccggtaccggcaaatcctccgacgactttcagcccggccaagtttgcttcatttatcactcagtactccactggacaggtcagcgtggaaattgagtgggagctacagaaagaaaacagcaaacgttggaatccagagattcagtacacttccaactacaacaagtctgttaatgtggactttactgtagacactaatggtgtttatagtgaacctcgccctattggaacccggtatctcacacgaaactcgtaa

SEQ ID NO: 783 - DNA, 2212 bp, synthetic construct
  misc_feature 1..2212: note = source = /note="Description of Artificial Sequence: Synthetic polynucleotide"
  source 1..2212: mol_type = other DNA
atggctgctgacggttatcttccagattggctcgaggacaacctttctgaaggcattcgtgagtggtgggctctgaaacctggagtccctcaacccaaagcgaaccaacaacaccaggacaaccgtcggggtcttgtgcttccgggttacaaatacctcggacccggtaacggactcgacaaaggagagccggtcaacgaggcggacgcggcagccctcgaacacgacaaagcttacgaccagcagctcaaggccggtgacaacccgtacctcaagtacaaccacgccgacgccgagtttcaggagcgtcttcaagaagatacgtcttttgggggcaaccttggcagagcagtcttccaggccaaaaagaggatccttgagcctcttggtctggttgagggagcagctaaaacggctcctggaaagaagaggcctgtagatcagtctcctcaggaaccggactcatcatctggtgttggcaaatcgggcaaacagcttgccagaaaaagactaaatttcggtcagactggcgactcagagtcagtcccagaccctcaacctctcggagaaccaccagcagcccccacaagtttgggatctaatacaatggcttcaggcggtggcgcaccaatggcagacaataacgagggtgccgatggagtgggtaattcctcaggaaattggcattgcgattcccaatggctgggcgacagagtcatcaccaccagcaccagaacctgggccctgcccacttacaacagccatctctacaagcaaatctccggccaatcaggagcttcaaacgacaaccactactttggctacagcaccccctgggggtattttgactttaacagattccactgccacttctcaccacgtgactggcagcgactcattaacaacaactggggattccggcccaagaaactcagcttcaagctcttcaacatccaagttaaagaggtcacgcagaacgatggcacgacgactattgccaataaccttaccagcacggttcaagtgtttacggactcggagtatcagctcccgtacgtgctcgggtcggcgcaccaaggctgtctcccgccgtttccagcggacgtcttcatggtccctcagtatggatacctcaccctgaacaacggaagtcaagcggtgggacgctcatccttttactgcctggagtacttcccttcgcagatgctaaggactggaaataacttccaattcagctataccttcgaggatgtaccttttcacagcagctacgctcacagccagagtttggatcgcttgatgaatcctcttattgatcagtatctgtactacctgaacagaacgcaaggaacaacctctggaacaaccaaccaatcacggctgctttttagccaggctgggcctcagtctatgtctttgcaggccagaaattggctacctgggccctgctaccggcaacagagactttcaaagactgctaacgacaacaacaacagtaactttccttggacagcggccagcaaatatcatctcaatggccgcgactcgctggtgaatcccaggaccagctatggccagtcacaaggacgatgaagaaaaatttttccctatgcacggcaatctaatatttggcaaagaagggacaacggcaagtaacgcagaattagataatgtaatgattacggatgaagaagagattcgtaccaccaatcctgtggcaacagagcagtatggaactgtggcaaataacttgcagagctcaaatacagctcccacgactagaactgtcaatgatcagggggccttacctggcatggtgtggcaagatcgtgacgtgtaccttcaaggacctatctgggcaaagattcctcacacggatggacactttcatccttctcctctgatgggaggctttggactgaaacatccgcctcctcaaatcatgatcaaaaatactccggtaccggcaaatcctccgacgactttcagcccggccaagtttgcttcatttatcactcagtactccactggacaggtcagcgtggaaattgagtgggagctacagaaagaaaacagcaaacgttggaatccagagattcagtacacttccaactacaacaagtctgttaatgtggactttactgtagacactaatggtgtttatagtgaacctcgccctattggaacccggtatctcacacgaaacttgtaa

SEQ ID NO: 784 - DNA, 2212 bp, synthetic construct
  misc_feature 1..2212: note = source = /note="Description of Artificial Sequence: Synthetic polynucleotide"
  source 1..2212: mol_type = other DNA
atggctgctgacggttatcttccagattggctcgaggacaacctttctgaaggcattcgtgagtggtgggctctgaaacctggagtccctcaacccaaagcgaaccaacaacaccaggacgaccgtcggggtcttgtgcttccgggttacaaatacctcggacccggtaacggactcgacaaaggagagccggtcaacgaggcggacgcggcagccctcgaacacgacaaagcttacgaccagcagctcaaggccggtgacaacccgtgcctcaagtacaaccacgccgacgccgagtttcaggagcgtcttcaagaagatacgtcttttgggggcaaccttggcagagcagtcttccaggccaaaaagaggatccttgagcctcttggtctggttgaggaagcagctaaaacggctcctggaaagaagaggcctgtagatcagtctcctcaggaaccggactcatcatctggtgttggcaaatcgggcaaacagcctgccagaaaaagactaaatttcggtcagactggcgactcagagtcagtcccagaccctcaacctctcggagaaccaccagcagcccccacaagtttgggatctaatacaatggcttcaggcggtagcgcaccaatggcagacaataacgagggtgccgatggagtgggtaattcctcaggaaattggcattgcgattcccaatggctgggcgacagagtcatcaccaccagcaccagaacctgggccctgcccacttacaacaaccatctctacaagcaaatctccagccaatcaggagcttcaaacgacaaccactactttggctacagcaccccttgggggtattttgactttaacagattccactgccacttctcaccacgtgactggcagcgactcattaacaacaactggggattccggcccaagaaactcagcttcaagctcttcaacatccaagttaaagaggtcacgcagaacgatggcacgacgactattgccaataaccttaccagcacggttcaagtgtttacggactcggagtatcagctcccgtacgtgctcgggtcggcgcaccaaggctgtctcccgccgtttccagcggacgtcttcatggtccctcagtatggatacctcaccctgaacaacggaagtcaagcggtgggacgctcatccttttactgcctggagtacttcccttcgcagatgctaaggactggaaataacttccaattcagctataccttcgaggatgtaccttttcacagcagctacgctcacagccagagtttggatcgcttgatggatcctcttattgatcagtatctgtactacctgaacagaacgcaaggaacaacctctggaacaaccaaccaatcacggctgctttttagccaggctgggcctcagtctatgtctttgcaggccagaaattggctacctgggccctgctaccggcaacagagactttcaaagactgctaacgacaacaacaacagtaactttccttggacagcggccagcaaatatcatctcaatggccgcgactcgctggtgaatccaggaccagctatggccagtcacaaaggacgatgaagaaaaatttttccctatgcacggcaatctaatatttggcaaagaagggacaacggcaagtaacgcagaattagataatgtaatgattacggatgaagaagagattcgtaccaccaatcctgtggcaacagagcagtatggaactgtggcaaataacttgcagagctcaaatacagctcccacgactagaactgtcaatgatcagggggccttacctggcatggtgtggcaagatcgtgacgtgtaccttcaaggacctatctgggcaaagattcctcacacggatggacactttcatccttctcctctgatgggaggctttggactgaaacatccgcctcctcaaatcatgatcaaaaatactccggtaccggcaaatcctccgacgactttcagcccggccaagtttgcttcatttatcactcagtactccactggacaggtcagcgtggaaattgagtgggagctacagaaagaaaacagcaaacgttggaatccagagattcagtacacttccaactacaacaagtctgttaatgtggactttactgtagacactaatggtgtttatagtgaacctcgccctattggaacccggtatctcacacgaaacctgtaa

SEQ ID NO: 785 - DNA, 2211 bp, synthetic construct
  misc_feature 1..2211: note = source = /note="Description of Artificial Sequence: Synthetic polynucleotide"
  source 1..2211: mol_type = other DNA
atggctgctgacggttatcttccagattggctcgaggacaacctttctgaaggcattcgtgagtggtgggctctgaaacctggagtccctcaacccaaagcgaaccaacaacaccaggacgaccgtcggggtcttgtgcttccgggttacaaatacctcggacccggtaacggactcgacaaaggagagccggtcaacgaggcggacgcggcagccctcgaacacgacaaagcttacgaccagcagctcaaggccggtgacaacccgtacctcaagtacaaccacgccgacgccgagtttcaggagcgtcttcaagaagatacgtcttttgggggcaaccttggcagagcagtcttccaggccaaaaagaggatccttgagcctcttggtctggttgaggaagcagctaaaacggctcctggaaagaagaggcctgtagatcagtctcctcaggaaccggactcatcatctggtgttggcaaatcgggcaaacagcctgccagaaaaagactaaatttcggtcagactggcgactcagagtcagtcccagaccctcaacctctcggagaaccaccagcagcccccacaagtttgggatctaatacaatggcttcaggcggtggcgcaccaatggcagacaataacgagggtgccgatggagtgggtaattcctcaggaaattggcattgcgattcccaatggctgggcaacagagtcatcaccaccagcaccagaacctgggccctgcccacttacaacaaccatctctacaagcaaatctccagccaatcaggagcttcaaacgacaaccactactttggctacagcaccccttgggggtattttgactttaacagattccactgccacttctcaccacgtgactggcagcgactcattaacaacaactggggattccggcccaagaaactcagcttcaagctcttcaacatccaagttaaagaggtcacgcagaacgatggcacgacgactattgccaataaccttaccagcacggttcaagtgtttacggactcggagtatcagctcccgtacgtgctcgggtcggcgcaccaaggctgtctcccgccgtttccagcggacgtcttcatggtccctcagtatggatacctcaccctgaacaacggaagtcaagcggtgggacgctcatccttttactgcctggagtacttcccttcgcagatgctaaggactggaaataacttccaattcagctataccttcgaggatgtaccttttcacagcagctacgctcacagccagagtttggatcgcttgatgaatcctcttattgatcagtatctgtactacctgaacagaacgcaaggaacaacctctggaacaaccaaccaatcacggctgctttttagccaggctgggcctcagtctatgtctttgcaggccagaaattggctacctgggccctgctaccggcaacagagactttcaaagactgctaacgacaacaacaacagtaactttccttggacagcggccagcaaatatcatctcaatggccgcgactcgctggtgaatccaggaccagctatggccagtcacaaggacgatgaagaaaaatttttccctatgcacggcaatctaatatttggcaaagaagggacaacggcaagtaacgcagaattagataatgtaatgattacggatgaagaagagattcgtaccaccaatcctgtggcaacagagcagtatggaactgtggcaaataacttgcagagctcaaatacagctcccacgactagaactgtcaatgatcagggggccttacctggcatggtgtggcaagatcgtgacgtgtaccttcaaggacctatctgggcaaagattcctcacacggatggacactttcatccttctcctctgatgggaggctttggactgaaacatccgcctcctcaaatcatgatcaaaaatactccggtaccggcaaatcctccgacgactttcagcccggccaagtttgcttcatttatcactcagtactccactggacaggtcagcgtggaaattgagtgggagctacagaaagaaaacagcaaacgttggaatccagagattcagtacacttccaactacaacaagtctgttaatgtggactttactgtagacactaatggtgtttatagtgaacctcgccctattggaacccggtatctcacacgaaacttgtaa

SEQ ID NO: 786 - DNA, 2211 bp, synthetic construct
  misc_feature 1..2211: note = source = /note="Description of Artificial Sequence: Synthetic polynucleotide"
  source 1..2211: mol_type = other DNA
atggctgctgacggttatcttccagattggctcgaggacaacctttctgaaggcattcgtgagtggtgggctctgaaacctggagtccctcaacccaaagcgaaccaacaacaccaggacgaccgtcggggtcttgtgcttccgggttacaaatacctcggacccggtaacggactcgacaaaggagagccggtcaacgaggcggacgcggcagccctcgaacacgacaaagcttacgaccagcagctcaaggccggtgacaacccgtacctcaagtacaaccacgccgacgccgagtttcaggagcgtcttcaagaagatacgtcttttgggggcaaccttggcagagcagtcttccaggccaaaaagaggatccttgagcctcttggtctggttgaggaagcagctaaaacggctcctggaaagaagaggcctgtagatcagtctcctcaggaaccggactcatcatctggtgttggcaaatcgggcaaacagcctgccagaaaaagactaaatttcggtcagactggcgactcagagtcagtcccagaccctcaacctctcggagaaccaccagcagcccccacaagtttgggatctaatacaatggcttcaggcggtggcgcaccaatggcggacaataacgagggtgccgatggagtgggtaattcctcaggaaattggcattgcgattcccaatggctgggcgacagagtcatcaccaccagcaccagaacctgggccctgcccacttacaacaaccatctctacaagcaaatctccagccaatcaggagcttcaaacgacaaccactactttggctacagcaccccttgggggtattttgactttaacagattccactgccacttctcaccacgtgactggcagcgactcattaacaacaactggggattccggcccaagaaactcagcttcaagctcttcaacatccaagttaaagaggtcacgcagaacgatggcacgacgactattgccaataaccttaccagcacggttcaagtgtttacggactcggagtatcagctcccgtacgtgctcgggtcggcgcaccaaggctgtctcccgccgtttccagcggacgtcttcatggtccctcagtatggatacctcaccctgaacaacggaagtcaagcggtgggacgctcatccttttactgcctggagtacttcccttcgcagatgctaaggactggaaataacttccaattcagctataccttcgaggatgtaccttttcacagcagctacgctcacagccagagtttggatcgcttgatgaatcctcttattgatcagtatctgtactacctgaacagaacgcaaggaacaacctctggaacaaccaaccaatcacggctgctttttagccaggctgggcctcagtctatgtctttgcaggccagaaattggctacctgggccctgctaccggcaacagagactttcaaagactgctaacgacaacaacaacagtaactttccttggacagcggccagcaaatatcatctcaatggccgcgactcgctggtgaatccaggaccagctatggccagtcacaaggacgatgaagaaaaatttttccctatgcacggcaatctaatatttggcaaagaagggacaacggcaagtaacgcagaattagataatgtaatgattacggatgaagaagagattcgtaccaccaatcctgtggcaacagtgcagtatggaactgtggcaaataacttgcagagctcaaatacagctcccacgactagaactgtcaatgatcagggggccttacctggcatggtgtggcaagatcgtgacgtgtaccttcaaggacctatctgggcaaagattcctcacacggatggacactttcatccttctcctctgatgggaggctttggactgaaacatccgcctcctcaaatcatgatcaaaaatactccggtaccggcaaatcctccgacgactttcagcccggccaagtttgcttcatttatcactcagtactccactggacaggtcagcgtggaaattgagtgggagctacagaaagaaaacagcaaacgttggaatccagagattcagtacacttccaactacaacaagtctgttaatgtggactttactgtagacactaatggtgtttatagtgaacctcgccctattggaacccggtatctcacacgaaacttgtaa

SEQ ID NO: 787 - DNA, 2211 bp, synthetic construct
  misc_feature 1..2211: note = source = /note="Description of Artificial Sequence: Synthetic polynucleotide"
  source 1..2211: mol_type = other DNA
atggctgctgacggttatcttccagattggctcgaggacaacctttctgaaggcattcgtgagtggtgggctctgaaacctggagtccctcaacccaaagcgaaccaacaacaccaggacaaccgtcggggtcttgtgcttccgggttacaaatacctcggacccggtaacggactcgacaaaggagagccggtcaacgaggcggacgcggcagccctcgaacacgacaaagcttacgaccagcagctcaaggccggtgacaacccgtacctcaagtacaaccacgccgacgccgagtttcaggagcgtcttcaagaagatacgtcttttgggggcaaccttggcagagcagtcttccaggccaaaaaggggatccttgagcctcttggtctggttgaggaagcagctaaaacggctcctggaaagaagaggcctgtagatcagtctcctcaggaaccggactcatcatctggtgttggcaaatcgggcaaacagcctgccagaaaaagactaaatttcggtcagactggcgactcagagtcagtcccagaccctcaacctctcggagaaccaccagcagcccccacaagtttgggatctaatacaatggcttcaggcggtggcgcaccaatggcagacaataacgagggtgccgatggagtgggtaattcctcaggaaattggcattgcgattcccaatggctgggcgacagagtcatcaccaccagcaccagaacctgggccctgcccacttacaacaaccatctctacaagcaaatctccagccaatcaggagcttcaaacgacaaccactactttggctacagcaccccttgggggtattttgactttaacagattccactgccacttctcaccacgtgactggcagcgactcattaacaacaactggggattccggcccaagaaactcagcttcaagctcttcaacatccaagttaaagaggtcacgcagaacgatggcacgacgactattgccaataaccttaccagcacggttcaagtgtttacggactcggagtatcagctcccgtacgtgttcgggtcggcgcaccaaggctgtctcccgccgtttccagcggacgtcttcatggtccctcagtatggatacctcaccctgaacaacggaagtcaagcggtgggacgctcatccttttactgcctggagtacttcccttcgcagatgctaaggactggaaataacttccaattcagctataccttcgaggatgtaccttttcacagcagctacgctcacagccagagttcggatcgcttgatgaatcctcttattgatcagtatctgtactacctgaacagaacgcaaggaacaacctctggaacaaccaaccaatcacggctgctttttagccaggctgggcctcagtctatgtctttgcaggccagaaattggctacctgggccctgctaccggcaacagagactttcaaagactgctaacgacaacaacaacagtaactttccttgaacagcggccagcaaatatcatctcaatggccgcgactcgctggtgaatccaggaccagctatggccagtcacaaggacgatgaagaaaaatttttccctatgcacggcaatctaatatttggcaaagaagggacaacggcaagtaacgcagaattagataatgtaatgattacggatgaagaagagattcgtaccaccaatcctgtggcaacagagcagtatggaactgtggcaaataacttgcagagctcaaatacagctcccacgactagaactgtcaatgatcagggggccttacctggcatggtgtggcaagatcgtgacgtgtaccttcaaggacctatctgggcaaagattcctcacacggatggacactttcatccttctcctctgatgggaggctttggactgaaacatccgcctcctcaaatcatgatcaaaaatactccggtaccggcaaatcctccgacgactttcagcccggccaagtttgcttcatttatcactcagtactccactggacaggtcagcgtggaaattgagtgggagctacagaaagaaaacagcaaacgttggaatccagagattcagtacacttccaactacaacaagtctgttaatgtggactttactgtagacactaatggtgtttatagtgaacctcgccctattggaacccggtatctcacacgaaacttgtaa

SEQ ID NO: 788 - DNA, 2211 bp, synthetic construct
  misc_feature 1..2211: note = source = /note="Description of Artificial Sequence: Synthetic polynucleotide"
  source 1..2211: mol_type = other DNA
atggctgctgacggttatcttccagattggctcgaggacaacctttctgaaggcattcgtgagtggtgggctctgaaacctggagtccctcaacccaaagcgaaccaacaacaccaggacaaccgtcggggtcttgtgcttccgggttacaaatacctcggacccggtaacggactcgacgaaggagagccggtcaacgaggcggacgcggcagccctcgaacacgacaaagcttacgaccagcagctcaaggccggtgacaacccgtacctcaagtacaaccacgccgacgccgagtttcaggagcgtcttcaagaagatacgtcttttgggggcaaccttggcagagcagtcttccaggccaaaaagaggatccttgagcctcttggtctggttgagggagcagctaaaacggctcctggaaagaagaggcctgtagatcagtctcctcaggaaccggactcatcatctggtgttggcaaatcgggcaaacagcctgccagaaaaagactaaatttcggtcagactggcgactcagagtcagtcccagaccctcaacctctcggagaaccaccagcagcccccacaagtttgggatctaatacaatggcttcaggcggtggcgcaccaatggcagacaataacgagggtgccgatggagtgggtaattcctcaggaaattggcattgcgattcccaatggctgggcgacagagtcatcaccaccagcaccagaacctgggccctgcccacttacaacagccacctctacaagcaaatctccagccaatcaggagcttcaaacgacaaccactactttggctacagcaccccttgggggtattttgactttaacagattccactgccacttctcaccacgtgactggcagcgactcattaacaacaactggggattccggcccaagaaactcagcttcaagctcttcaacatccaagttaaagaggtcacgcagaacgatggcacgacgactattgccaataaccttaccagcacggttcaagtgtttacggactcggagtatcagctcccgtacgtgctcgggtcggcgcaccaaggctgtctcccgccgtttccagcggacgtcttcatggtccctcagtatggatacctcaccctgaacaacggaagtcaagcggtgggacgctcatccttttactgcctggagtacttcccttcgcagatgctaaggactggaaataacttccaattcagctataccttcgaggatgtaccttttcacagcagctacgctcacagccagagtttggatcgcttgatgaatcctcttattgatcagtatctgtactacctgaacagaacgcaaggaacaacctctggaacaaccaaccaatcacggctgctttttagccaggctgggcctcagtctatgtctttgcaggccagaaattggctacctgggccctgctaccggcaacagagactttcaaagactgctaacgacaacaacaacagtaactttccttggacagcggccagcaaatatcatctcaatggccgcgactcgctggtgaatccaggaccagctatggccagtcacaaggacgatgaagaaaaatttttccctatgcacggcaatctaatatttggcaaagaagggacaacggcaagtaacgcagaattagataatgtaatgattacggatgaagaagagattcgtaccaccaatcctgtggcaacagagcagtatggaactgtggcaaataacttgcagagctcaaatacagctcccacgactagaactgtcaatgatcagggggccttacctggcatggtgtggcaagatcgtgacgtgtaccttcaaggacctatctgggcaaagattcctcacacggatggacactttcatccttctcctctgatgggaggctttggactgaaacatccgcctcctcaaatcatgatcaaaaatactccggtaccggcaaatcctccgacgactttcagcccggccaagtttgcttcatttatcactcagtactccactggacaggtcagcgtggaaattgagtgggagctacagaaagaaaacagcaaacgttggaatccagagattcagtacacttccaactacaacaagtctgttaatgtggactttactgtagacactaatggtgtttatagtgaacctcgccctattggaacccggtatctcacacgaaacttgtaa

SEQ ID NO: 789 - DNA, 2211 bp, synthetic construct
  misc_feature 1..2211: note = source = /note="Description of Artificial Sequence: Synthetic polynucleotide"
  source 1..2211: mol_type = other DNA
atggctgctgacggttatcttccagattggctcgaggacaacctttctgaaggcattcgtgagtggtgggctctgaaacctggagtccctcaacccaaagcgaaccaacaacaccaggacaaccgtcggggtcttgtgcttccgggttacaaatacctcggacccggtaacggactcgacaaaggagagccggtcaacgaggcggacgcggcagccctcgaacacgacaaagcttacgaccagcagctcaaggccggtgacaacccgtacctcaagtacaaccacgccgacgccgagtttcaggagcgtcttcaagaagatacgtcttttgggggcaaccttggcagagcagtcttccaggccaaaaagaggatccttgagcctcttggtctggttgagggagcagctaaaacggctcctggaaagaagaggcctgtagatcagtctcctcaggaaccggactcatcatctggtgttggcaaatcgggcaaacagcctgccagaaaaagactaaatttcggtcagactggcgactcagagtcagtcccagaccctcaacctctcggagaaccaccagcagcccccacaagtttgggatctaatacaatggcttcaggcggtggcgcaccaatggcagacaataacgagggtgccgatggagtgggtaattcctcaggaaattggcattgcgattcccaatggctgggcgacagagtcatcaccaccagcaccagaacctgggccctgcccacttacaacagccatctctacaagcaaatctccagccaatcaggagcttcaaacgacaaccactactttggctacagcaccccttggggtattttgactttaacagattccactgccacttctcaccacgtgactggcagcgactcattaacaacaactggggattccggcccaagaaactcagcttcaagctcttcaacatccaagttaaagaggtcacgcagaacgatggcacgacgactattgccaataaccttaccagcacggttcaagtgtttacggactcggagtatcagctcccgtacgtgctcgggtcggcgcaccaaggctgtctcccgccgtttccagcggacgccttcatggtccctcagtatggatacctcaccctgaacaacggaagtcaagcggtgggacgctcatccttttactgcctggagtacttcccttcgcagatgctaaggactggaaataacttccaattcagctataccctcgaggatgtaccttttcacagcagctacgctcacagccagagtttggatcgcttgatgaatcctcttattgatcagtatctgtactacctgaacagaacgcaaggaacaacctctggaacaaccaaccaatcacggctgctttttagccaggctgggcctcagtctatgtctttgcaggccagaaattggctacctgggccctgctaccggcaacagagactttcaaagactgctaacgacaacaacaacagtaactttccttggacagcggccagcaaatatcatctcaatggccgcgactcgctggtgaatccaggaccagctatggccagtcacaaaggacgatgaagaaaaatttttccctatgcacggcaatctaatatttggcaaagaagggacaacggcaagtaacgcagaattagatagtgtaatgattacggatgaagaagagattcgtaccaccaatcctgtggcaacagagcagtatggaactgtggcaaataacttgcagagctcaaatacagctcccacgactagaactgtcaatgatcagggggccttacctggcatggtgtggcaagatcgtgacgtgtaccttcaaggacctatctgggcaaagattcctcacacggatggacactttcatccttctcctctgatgggaggctttggactgaaacatccgcctcctcaaatcatgatcaaaaatactccggtaccggcaaatcctccgacgactttcagcccggccaagtttgcttcatttatcactcagtactccactggacaggtcagcgtggaaattgagtgggagctacagaaagaaaacagcaaacgttggaatccagagattcagtacacttccaactacaacaagtctgttaatgtggactttactgtagacactaatggtgtttatagtgaacctcgccctattggaacccggtatctcacacgaaacttgtaa

SEQ ID NO: 790 - DNA, 2205 bp, synthetic construct
  misc_feature 1..2205: note = source = /note="Description of Artificial Sequence: Synthetic polynucleotide"
  source 1..2205: mol_type = other DNA
atgactgacggttaccttccagattggctagaggacaacctctctgagggcgttcgagagtggtgggcgctgcaacctggagcccctaaacccaaggcaaatcaacaacatcaggacaacgctcggggtcttgtgcttccgggttacaaatacctcggacccggcaacggactcgacaagggggaacccgtcaacgcagcggacgcggcagccctcgagcacgacaaggcctacgaccagcagctcaaggccggtgacaacccctacctcaagtacaaccacgccgacgcggagttccagcagcggcttcagggcgacacatcgtttgggggcaacctcggcagagcagtcttccaggccaaaaagagggttcttgaacctcttggtctggttgagcaagcgggtgagacggctcctggaaagaagagaccgttgattgaatccccccagcagcccgactcctccacgggtatcggcaaaaaaggcaagcagccggctaaaaagaagctcgttttcgaagacgaaactggagcaggcgacggaccccctgagggatcaacttccggagccatgtctgatgacagtgagatgcgtgcagcaactggcggagctgcagtcgagggcggacaaggtgccgatggagtgggtaatgcctcgggtgattggcattgcgattccacctggtctgagggccacgtcacgaccaccagcaccagaacctgggtcttgcccacctacaacaaccacctctacaagcgactcggagagagcctgcagtccaacacctacaacggattctccaccccctggggatactttgacttcaaccgcttccactgccacttctcaccacgtgactggcagcgactcatcaacaacaactggggcatgcgacccaaagccatgcgggtcaaaatcttcaacatccaggtcaaggaggtcacgacgtcgaacggcgagacaacggtggctaataaccttaccagcacggttcagatctttgcggactcgtcgtacgaactgccgtacgtgatggatgcgggtcaagagggcagcctgcctccttttcccaacgacgtctttatggtgccccagtacggctactgtggactggtgaccggcaacacttcgcagcaacagactgacagaaatgccttctactgcctggagtactttccttcgcagatgctgcggactggcaacaactttgaaattacgtacagttttgagaaggtgcctttccactcgatgtacgcgcacagccagagcctggaccggctgatgaaccctctcatcgaccagtacctgtggggactgcaatcgaccaccaccggaaccaccctgaatgccgggactgccaccaccaactttaccaagctgcggcctaccaacctttccaactttaaaaagaactggctgcccgggccttcaatcaagcagcagggcttctcaaagactgccaatcaaaactacaagatccctgccaccgggtcagacagtctcatcaaatacgagacgcacagcactctggacggaagatggagtgccctgacccccggacctccaatggccacggctggacctgcggacagcaagttcagcaacagccagctcatctttgcggggcctaaacagaacggcaacacggccaccgtacccgggactctgatcttcacctctgaggaggagctggcagccaccaacgctaccgatacggacatgtggggcaacctacctggcggtgaccagagcaacagcaacctgccgaccgtggacagactgacagccttgggagccgtgcctggaatggtctggcaaaacagagacatttactaccagggtcccatttgggccaagattcctcataccgatggacactttcacccctcaccgctgattggtgggtttgggctgaaacacccgcctcctcaaatttttatcaagaacaccccggtacctgcgaatcctgcgacgaccttcagctctactccggtaaactccttcattactcagtacagcactggccaggtgtcggtgcagattgactgggagatccagaaggagcggtccaaacgctggaaccccgaggtccagtttacctccaactacggacagcaaaactctctgttgtgggctcccgatgcggctgggaaatacactgagcctagggctatcggtacccgctacctcacccaccacctgtaa

SEQ ID NO: 791 - DNA, 2205 bp, synthetic construct
  misc_feature 1..2205: note = source = /note="Description of Artificial Sequence: Synthetic polynucleotide"
  source 1..2205: mol_type = other DNA
atgactgacggttaccttccagattggctagaggacaacctctctgaaggcgttcgagagtggtgggcgctgcaacctggagcccctaaacccaaggcaaatcaacaacatcaggacaacgctcggggtcttgtgcttccgggttacaaatacctcggacccggcaacggactcgacaagggggaacccgtcaacgcagcggacgcggcagccctcgagcacgacaaggcctacgaccagcagctcaaggccggtgacaacccctacctcaagtacaaccacgccgacgcggagttccagcagcggcttcagggcgacacatcgtttgggggcaacctcggcagagcagtcttccaggccaaaaagagggttcttgaacctcttggtctggttgagcaagcgggtgagacggctcctggaaagaagagaccgttgattgaatccccccagcagcccgactcctccacgggtatcggcaaaaaaggcaagcagccggctaaaaagaagctcgttttcgaagacgaaactggagcaggcgacggaccccctgagggatcaacttccggagccatgtctgatgacagtgagatgcgtgcagcagctggcggagctgcagtcgagggcggacaaggtgccgatggagtgggtaatgcctcgggtgattggcattgcgattccacctggtctgagggccacgtcacgaccaccagcaccagaacctgggtcttgcccacctacaacaaccacctctacaagcgactcggagagagcctgcagtccaacacctacaacggattctccaccccctggggatactttgacttcaaccgcttccactgccacttcttaccacgtgactggcagcgactcatcaacaacaactggggcgtgcgacccaaagccatgcgggtcaaaatcttcaacatccaggtcaaggaggtcacgacgtcgaacggcgagacaacggtggctaataaccttaccagcacggttcagatctttgcggactcgtcgtacgaactgccgtacgtgatggatgcgggtcaagagggcagcctgcctccttttcccaacgacgtctttatggtgccccagtacggctactgtggactggtgaccggcgacacttcgcagcaacagactgacagaaatgccttctactgcctggagtactttccttcgcagatgctgcggactggcaacaactttgaaattacgtacagttttgagaaggtgcctttccactcgatgtacgcgcacagccagagcctggaccggctgatgaaccctctcatcgaccagtacctgtggggactgcaatcgaccaccaccggaaccaccctgaatgccgggactgccaccaccaactttaccaagctgcggcctaccaacttttccaactttaaaaagaactggctgcccgggccttcaatcaagcagcagggcttctcaaagactgccaatcaaaactacaagatccctgccaccgggtcagacagtctcatcaaatacgagacgcacagcactctggacggaagatggagtgccctgacccccggacctccaatggccacggctggacctgcggacagcaagttcagcaacagccagctcatctttgcggggcctaaacagaacggcaacacggccaccgtacccgggactctgatcttcacctctgaggaggagctggcagccaccaacgccaccgatacggacatgtggggcaacctacctggcggtgaccagagcaacagcaacctgccgaccgtggacagactgacagccttgggagccgtgcctggaatggtctggcaaaacagagacatttactaccagggtcccatttgggccaagattcctcataccgatggacactttcacccctcaccgctgattggtgggtttgggctgaaacacccgcctcctcaaatttttatcaagaacaccccggtacctgcgaatcctgcgacgaccttcagctctactccggtaaactccttcattactcagtacagcactggccaggtgtcggtgcagattgactgggagatccagaaggagcggtccaaacgctggaaccccgaggtccagtttacctccaactacggacagcaaaactctctgttgtgggctcccgatgcggctgggaaatacactgagcctagggctatcggtacccgctacctcacccaccacctgtaa

SEQ ID NO: 792 - DNA, 2205 bp, synthetic construct
  misc_feature 1..2205: note = source = /note="Description of Artificial Sequence: Synthetic polynucleotide"
  source 1..2205: mol_type = other DNA
atgactgacggttaccttccagattggctagaggacaacctctctgaaggcgttcgagagtggtgggcgctgcaacctggagcccctaaacccaaggcaaatcaacaacatcaggacaacgctcggggtcttgtgcttccgggttacaaatacctcggacccggcaacggactcgacgagggggaacccgtcaacgcagcggacgcggcagccctcgagcacgacaaggcctacgaccagcagctcaaggccggtgacaacccctacctcaagtacaaccacgccgacgcggagttccagcagcggcttcagggcgacacatcgtttgggggcaacctcggcagagcagtcttccaggccaaaaagagggttcttgaacctcttggtctggttgagcaagcgggtgagacggctcctggaaagaagagaccgttgattgaatccccccagcagcccgactcctccacgggtatcggcaaaaaaggcaagcagccggctaaaaagaagctcgttttcgaagacgaaactggagcaggcgacggaccccctgagggatcaacttccggagccatgtctgatgacagtgagatgcgtgcagcagctggcggagctgcagtcgagggcggacaaggtgccgatggagtgggtaatgcctcgggtgattggcattgcgattccacctggtctgagggccacgtcacgaccaccagcaccagaacctgggtcttgcccacctacaacaaccacctctacaagcgactcggagagagcctgcagtccaacacctacaacggattctccaccccctggggatactttgacttcaaccgcttccactgccacttctcaccacgtgactggcagcgactcatcaacaacaactggggcatgcgacccaaagccatgcgggtcaaaatcttcaacatccaggtcaaggaggtcacgacgtcgaacggcgagacaacggtggctaataaccttaccagcacggttcagatctttgcggactcgtcgtacgaactgccgtacgtgatggatgcgggtcaagagggcagcctgcctccttttcccaacgacgtctttatggtgccccagtacggctactgtggactggtgaccggcaacacttcgcagcaacagactgacagaaatgccttctactgcctggagtactttccttcgcagatgctgcggactggcaacaactttgaaattacgtacagttttgagaaggtgcctttccactcgatgtacgcgcacagccagagcctggaccggctgatgaaccctctcatcgaccagtacctgtggggactgcaatcgaccaccaccggaaccaccctgaatgccgggactgccaccaccaactttaccaagctgcggcctaccaacttttccaactttaaaaagaactggctgcccgggccttcaatcaagcagcagggcttctcaaagactgccaatcaaaactacaagatccctgccaccgggtcagacagtctcatcaaatacgagacgcacagcactctggacggaagatggagtgccctgacccccggacctccaatggccacggctggacctgcggacagcaagttcagcaacagccagctcatctttgcggggcctaaacagaacggcaacacggccaccgtacccgggactctgatcttcacctctgaggaggagctggcagccaccaacgctaccgatacggacatgtggggcaacctacctggcggtgaccagagcaacagcaacctgccgaccgtggacagactgacagccttgggagccgtgcctggaatggtctggcaaaacagagacatttactaccagggtcccatttgggccaagattcctcataccgatggacactttcacccctcaccgctgattggtgggtttgggctgaaacacccgcctcctcaaatttttatcaagaacaccccggtacctgcgaatcctgcgacgaccttcagctctactccggtaaactccttcattactcagtacagcactggccaggtgtcggtgcagattgactgggagatccagaaggagcggtccaaacgctggaaccccgaggtccagtttacctccaactacggacagcaaaactctctgttgtgggctcccgatgcggctgggaaatacactgagcctagggctatcggtacccgctacctcacccaccacctgtaa

SEQ ID NO: 793 - DNA, 2205 bp, synthetic construct
  misc_feature 1..2205: note = source = /note="Description of Artificial Sequence: Synthetic polynucleotide"
  source 1..2205: mol_type = other DNA
atgactgacggttaccttccagattggctagaggacaacctctctgaaggcgttcgagagtggtgggcgctgcaacctggagcccctaaacccaaggcaaatcaacaacatcaggacaacgctcggggtcttgtgcttccgggttacaaatacctcggacccggcaacggactcgacaagggggaacccgtcaacgcagcggacgcggcagccctcgagcacgacaaggcctacgaccagcagctcaaggccggtgacaacccctacctcaagtacaaccacgccgacgcggagttccagcagcggcttcagggcgacacatcgtttgggggcaacctcggcagagcagtcttccaggccaaaaagagggttcttgaacctcttggtctggttgagcaagcgggtgagacggctcctggaaagaagagaccgttgattgaatccccccagcagcccgactcctccacgggtatcggcaaaaaaggcaagcagccggctaaaaagaagctcgttttcgaagacggaactggagcaggcgacggaccccctgagggatcaacttccggagccatgtctgatgacagtgagatgcgtgcagcagctggcggagctgcagtcgagggcggacaaggtgccgatggagtgggtaatgcctcgggtgattggcattgcgattccacctggtctgagggccacgtcacgaccaccagcaccagaacctgggtcttgcccacctacaacaaccacctctacaagcgactcggagagagcctgcagtccaacacctacaacggattccccaccccctggggatactttgacttcaaccgcttccactgccacttctcaccacgtgactggcagcgactcatcaacaacaactggggcatgcgacccaaagccatgcgggtcaaaatcttcaacatccaggtcaaggaggtcacgacgtcgaacggcgagacaacggcggctaataaccttaccagcacggttcagatctttgcggactcgtcgtacgaactgccgtacgtgatggatgcgggtcaagagggcagcctgcctccttttcccaacgacgtctttatggtgccccagtacggctactgtggactggtgaccggcaacacttcgcagcaacagactgacagaaatgccttctactgcctggagtactttccttcgcagatgctgcggactggcaacaactttgaaattacgtacagttttgagaaggtgcctttccactcgatgtacgcgcacagccagagcctggaccggctgatgaaccctctcatcgaccagtacctgtggggactgcaatcgaccaccaccggaaccaccctgaatgccgggactgccaccaccaactttaccaagctgcggcctaccaacttttccaactttaaaaagaactggctgcccgggccttcaatcaagcagcagggcttctcaaagactgccaatcaaaactacaagatccctgccaccgggtcagacagtctcatcaaatacgagacgcacagcactctggacggaagatggagtgccctgacccccggacctccaatggccacggctggacctgcggacagcaagttcagcaacagccagctcatctttgcggggcctaaacagaacggcaacacggccaccgtacccgggactctgatcttcacctctgaggaggagctggcagccaccaacgccaccgatacggacatgtggggcaacctacctggcggtgaccagagcaacagcaacctgccgaccgtggacagactgacagccttgggagccgtgcctggaatggtctggcaaaacagagacatttactaccagggtcccatttgggccaagattcctcataccgatggacactttcacccctcaccgctgattggtgggtttgggctgaaacacccgcctcctcaaatttttatcaagaacaccccggtacctgcgaatcctgcgacgaccttcagctctactccggtaaactccttcattactcagtacagcactggccaggtgtcggtgcagattgactgggagatccagaaggagcggtccaaacgctggaaccccgaggtccagtttacctccaactacggacagcaaaactctctgttgtgggctcccgatgcggctgggaaatacactgagcctagggctatcggtacccgctacctcacccaccacctgtaa

SEQ ID NO: 794 - DNA, 2205 bp, synthetic construct
  misc_feature 1..2205: note = source = /note="Description of Artificial Sequence: Synthetic polynucleotide"
  source 1..2205: mol_type = other DNA
atgactgacggttaccttccagattggctagaggacaacctctctgaaggcgttcgagagtggtgggcgctgcaacctggagcccctaaacccaaggcaaatcaacaacatcaggacaacgctcggggtcttgtgcttccgggttacaaatacctcggacccggcaacggactcgacaagggggaacccgtcaacgcagcggacgcggcagccctcgagcacgacaaggcctacgaccagcagctcaaggccggtgacaacccctacctcaagtacaaccacgccgacgcggagttccagcagcggcttcagggcgacacatcgtttgggggcaacctcggcagagcagtcttccaggccaaaaagagggttcttgaacctcttggtctggttgagcaagcgggtgagacggctcctggaaagaagagaccgttgattgaatccccccagcagcccgactcctccacgggtatcggcaaaaaaggcaagcagccggctaaaaagaagctcgttttcgaagacgaaactggagcaggcgacggaccccctgagggatcaacttccggagccatgtctgatgacagtgagatgcgtgcagcagctggcggagctgcagtcgagggcggacaaggtgccgatggagtgggtaatgcctcgggtgattggcattgcgattccacctggtctgagggccacgtcacgaccaccagcaccagaacctgggtcttgcccacctacaacaaccacctctacaagcgactcggagagagcctgcagtccaacacctacaacggattctccaccccctggggatactttgacttcaaccgcttccactgccacttctcaccacgtgactggcagcgactcatcaacaacaactggggcatgcgacccaaagccatgcgggtcaaaatcttcaacatccaggtcaaggaggtcacgacgtcgaacggcgagacaacggtggctaataaccttaccagcacggttcagatctttgcggactcgtcgtacgaactgccgtacgtgatggatgcgggtcaagagggcagcctgcctccttttcccaacgacgtctttatggtgccccagtacggctaccgtggactggtgaccggcaacacttcgcagcaacagactgacagaaatgccttctactgcctggagtactttccttcgcagatgctgcggactggcaacaactttgaaattacgtacagttttgagaaggtgcctttccactcgatgtacgcgcacagccagagcctggaccggctgatgaaccctctcatcgaccagtacctgtggggactgcaatcgaccaccaccggaaccaccctgaatgccgggactgccaccaccaactttaccaagctgcggcctaccaacttttccaactttaaaaagaactggctgcccgggccttcaatcaagcagcagggcttctcaaagactgccaatcaaaactacaagatccctgccaccgggtcagacagtctcatcaaatacgagacgcacagcactctggacggaagatggagtgccctgacccccggacctccaatggccacggctggacctgcggacagcaagttcagcaacagccagctcatctttgcggggcctaaacagaacggcaacacggccaccgtacccgggactctgatcttcacctctgaggaggagctggcagccaccaacgccaccgatacggacatgtggggcaacctacctggcggtgaccagagcaacagcaacctgccgaccgtggacagactgacagccttgggagccgtgcctggaatggtctggcaaaacagagacatttactaccagggtcccatttgggccaagattcctcataccgatggacactttcacccctcaccgctgattggtgggtttgggctgaaacacccgcctcctcaaatttttatcaagaacaccccggtacctgcgaatcctgcgacgaccttcagctctactccggtaaactccttcattactcagtacagcactggccaggtgtcggtgcagattgactgggagatccagaaggagcggtccaaacgctggaaccccgaggtccagtttacctccaactacggacagcaaaactctctgttgtgggctcccgatgcggctgggaaatacactgagcctagggctatcggtacccgctacctcacccaccacctgtaa

SEQ ID NO: 795 - DNA, 2205 bp, synthetic construct
  misc_feature 1..2205: note = source = /note="Description of Artificial Sequence: Synthetic polynucleotide"
  source 1..2205: mol_type = other DNA
atgactgacggttaccttccagattggctagaggacaacctctctgaaggcgttcgagagtggtgggcgctgcaacctggagcccctaaacccaaggcaaatcaacaacatcaggacaacgctcggggtcttgtgcttcagggttacaaatacctcggacccggcaacggactcgacaagggggaacccgtcaacgcagcggacgcggcagccctcgagcacgacaaggcctacgaccagcagctcaaggccggtgacaacccctacctcaagtacaaccacgccgacgcggagttccagcagcggcttcagggcgacacatcgtttgggggcaacctcggcagagcagtcttccaggccaaaaagagggttcttgaaccccttggtctggttgagcaagcgggtgagacggctcctggaaagaagagaccgttgattgaatccccccagcagcccgactcctccacgggtatcggcaaaaaaggcaagcagccggctaaaaagaagctcgttttcgaagacgaaactggagcaggcgacggaccccctgagggatcaacttccggagccatgtctgatgacagtgagatgcgtgcagcagctggcggagctgcagtcgagggcggacaaggtgccgatggagtgggtaatgcctcgggtgattggcattgcgattccacccggtctgagggccacgtcacgaccaccagcaccagaacctgggtcttgcccacctacaacaaccacctctacaagcgactcggagagagcctgcagtccaacacctacaacggattctccaccccctggggatactttgacttcaaccgcttccactgccacttctcaccacgtgactggcagcgactcatcaacaataactggggcatgcgacccaaagccatgcgggtcaaaatcttcaacatccaggtcaaggaggtcacgacgtcgaacggcgagacaacggtggctaataaccttaccagcacggttcagatctttgcggactcgtcgtacgaactgccgtacgtgatggatgcgggtcaagagggcagcctgcctccttttcccaacgacgtctttatggtgccccagtacggctactgtggactggtgaccggcaacacttcgcagcaacagactgacagaaatgccttctactgcctggagtactttccttcgcagatgctgcggactggcaacaactttgaaattacgtacagttttgagaaggtgcctttccactcgatgtacgcgcacagccagagcctggaccggctgatgaaccctctcatcgaccagtacctgtggggactgcaatcgaccaccaccggaaccaccctgaatgccgggactgccaccaccaactttaccaagctgcggcctaccaacttttccaactttaaaaagaactggctgcccgggccttcaatcaagcagcagggcttctcaaagactgccaatcaaaactacaagatccctgccaccgggtcagacagtctcatcaaatacgagacgcacagcactctggacggaagatggagtgcccggacccccggacctccaatggccacggctggacctgcggacagcaagttcagcaacagccagctcatctttgcggggcctaaacagaacggcaacacggccaccgtacccgggactctgatcttcacctctgaggaggagctggcagccaccaacgccaccgatacggacatgtggggcaacctacctggcggtgaccagagcaacagcaacctgccgaccgtggacagactgacagccttgggagccgtgcctggaatggtctggcaaaacagagacatttactaccagggtcccatttgggccaagattcctcataccgatggacactttcacccctcaccgctgattggtgggtttgggctgaaacacccgcctcctcaaatttttatcaagaacaccccggtacctgcgaatcctgcgacgaccttcagctctactccggtaaactccttcattactcagtacagcactggccaggtgtcggtgcagattgactgggagatccagaaggagcggtccaaacgctggaaccccgaggtccagtttacctccaactacggacagcaaaactctctgttgtgggctcccgatgcggctgggaaatacactgagcctagggctatcggtacccgctacctcacccaccacctgtaa

SEQ ID NO: 796 - DNA, 2175 bp, synthetic construct
  misc_feature 1..2175: note = source = /note="Description of Artificial Sequence: Synthetic polynucleotide"
  source 1..2175: mol_type = other DNA
atgtcttttgttgatcaccctccagattggttggaagaagttggtgaaggtcttcgcgagtttttgggccttgaagcgggcccaccgaaaccaaaacccaatcagcagcatcaagatcaagcccgtggtcttgtgctgcctggttataactatctcggacccggaaacggtctcgatcgaggagagcctgtcaacagggcagacgaggtcgcgcgagagcacgacatctcgtacaacgagcagcttgaggcgggagacaacccctacctcaagtacaaccacgcggacgccgagtttcaggagaggctcgccgacgacacatccttcgggggaaacctcggaaaggcagtctttcaggccaagaaaagggttctcgaaccttttggcctggttgaagagggtgctaagacggcccctaccggaaagcggatagacgaccactttccaaaaagaaagaaggcccggaccgaagaggactccaagccttccacctcgtcagacgccgaagctggacccagcggatcccagcagctgcaaatcccagcccaaccagcctcaagtttgggagctgatacaatgtctgcgggaggtggcggcccattgggcgacaataaccaaggtgccgatggagtgggcaatgcctcgggagattggcattgcgattccacgtggatgggggacagagtcgtcaccaagtccacccgaacctgggtgctgcccagctacaacaaccaccagtaccgagagatcaaaagcggctccgtcgacggaagcaacgccaacgcctactttggatacagcaccccctgggggtactttgactttaaccgcttccacagccactggagcccccgagactggcaaagactcatcaacaactactggggcttcagaccccggtccctcagagtcaaaatcttcaacattcaagtcaaagaggtcacggtgcaggactccaccaccaccatcgccaacaacctcacctccaccgtccaagtgtttacggacgacgactaccagctgccctacgtcgtcggcaacgggaccgagggatgcctgccggccttccctccgcaggtctttacgctgccgcagtacggttacgcgacgctgaaccgcgacaacacagaaaatcccaccgagaggagcagcttcttctgcctagagtactttcccagcaagatgctgagaacgggcaacaactttgagtttacctacaactttgaggaggtgcccttccactccagcttcgctcccagtcagaacctcttcaagctggccaacccgctggtggaccagtacttgtaccgcttcgtgagcacaaataacactggcggagtccagttcaacaagaacctggccgggagatacgccaacacctacaaaaactggttcccggggcccatgggccgaacccagggctggaacctgggctccggggtcaaccgcgccagtgtcagcgccttcgccacgaccaataggatggagctcgagggcgcgagttaccaggtgcccccgcagccgaacggcatgaccaacaacctccagggcagcaacacctatgccctggagaacactatgatcttcaacagccagccggcgaacccgggcaccaccgccacgtacctcgagggcaacatgctcatcaccagcgagagcgagacgcagccggtgaaccgcgtggcgtacaacgtcggcgggcagatggccaccaacaaccagagctccaccactgcccccgcgaccggcacgtacaacctccaggaaatcgtgcccggcagcgtgtggatggagagggacgtgtacctccaaggacccatctgggccaagatcccagagacggaggcgcactttcacccctctccggccatgggcggattcggactcaaacacccaccgcccatgatgctcatcaagaacacgcctgtgcccggaaatatcaccagcttctcggacgtgcccgtcagcagcttcatcacccagtacagcaccgggcaggtcaccgtggagatggagtgggagctcaagaaggaaaactccaagaggtggaacccagagatccagtacacaaacaactacaacgacccccagtttgtggactttgccccggacagcaccggggaatacagaaccaccagacctatcggaacccgataccttacccgacccctttaa

SEQ ID NO: 797 - DNA, 2175 bp, synthetic construct
  misc_feature 1..2175: note = source = /note="Description of Artificial Sequence: Synthetic polynucleotide"
  source 1..2175: mol_type = other DNA
atgtcttttgttgatcaccctccagattggttggaagaagttggtgaaggtcttcgcgagtttttgggccttgaagcgggcccaccgaaaccaaaacccaatcagcagcatcaagatcaagcccgtggtcttgtgctgcctggttataactatctcggacccggaaacggtctcgatcgaggagagcctgtcaacagggcagacgaggtcgcgcgagagcacgacatctcgtacaacgagcagcttgaggcgggagacaacccctacctcaagtacaaccacgcggacgccgagtttcaggagaagctcgccgacgacacatcctccgggggaaacctcggaaaggcagtctttcaggccaagaaaagggttctcgaaccttttggcctggttgaagagggtgctaagacggcccctaccggaaagcggatagacgaccactttccaaaaagaaagaaggcccggaccgaagaggactccaagccttccacctcgtcagacgccgaagctggacccagcggatcccagcagctgcaaatcccagcccaaccagcctcaagtttgggagctgatacaatgtctgcgggaggtggcggcccattgggcgacaataaccaaggtgccgatggagtgggcaatgcctcgggagattggcattgcgattccacgtggatgggggacagagtcgtcaccaagtccacccgaacctgggtgctgcccagctacaacaaccaccagtaccgagagatcaaaagcggctccgtcgacggaagcaacgccaacgcctactttggatacagcaccccctgggggtactttgactttaaccgcttccacagccactggagcccccgagactggcaaagactcatcaacaactactggggcttcagaccccggtccctcagagtcaaaatcttcaacattcaagtcaaagaggtcacggtgcaggactccaccaccaccatcgccaacaacctcacctccaccgtccaagtgtttacggacgacgactaccagctgccctacgtcgtcggcaacgggaccgagggatgcctgccggccttccctccgcaggtctttacgctgccgcagtacggttacgcgacgctgaaccgcgacaacacagaaaatcccaccgagaggagcagcttcttctgcctagagtactttcccagcaagatgctgagaacgggcaacaactttgagtttacctacaactttgaggaggtgcccttccactccagcttcgctcccagtcagaacctcttcaagctggccaacccgctagtggaccagtacttgtaccgcttcgtgagcacaaataacactggcggagtccagttcaacaagaacctggccgggagatacgccaacacctacaaaaactggttcccggggcccatgggccgaacccagggctggaacctgggctccggggtcaaccgcgccagtgtcagcgccttcgccacgaccaataggatggagctcgagggcgcgagttaccaggtgcccccgcagccgaacggcatgaccaacaacctccagggcagcaacacctatgccctggagaacactatgatcttcaacagccagccggcgaacccgggcaccaccgccacgtacctcgagggcaacatgctcatcaccagcgagagcgagacgcagccggtgaaccgcgtggcgtacaacgtcggcgggcagatggccaccaacaaccagagctccaccactgcccccgcgaccggcacgtacaacctccaggaaatcgtgcccggcagcgtgtggatggagagggacgtgtacctccaaggacccatctgggccaagatcccagagacgggggcgcactttcacccctctccggccatgggcggattcggactcaaacacccaccgcccatgatgctcatcaagaacacgcctgtgcccggaaatatcaccagcttctcggacgtgcccgtcagcagcttcatcacccagtacagcaccgggcaggtcaccgtggagatggagtgggagctcaagaaggaaaactccaagaggtggaacccagagatccagtacacaaacaactacaacgacccccagtttgtggactttgccccggacagcaccggggaatacagaaccaccagacctatcggaacccgataccttacccgacccctttaa

SEQ ID NO: 798 - DNA, 2175 bp, synthetic construct
  misc_feature 1..2175: note = source = /note="Description of Artificial Sequence: Synthetic polynucleotide"
  source 1..2175: mol_type = other DNA
atgtcttttgttgatcaccctccagattggttggaagaagttggtgaaggtcttcgcgagtttttgggccttgaagcgggcccaccgaaaccaaaacccaatcagcagcatcaagatcaagcccgtggtcttgtgctgcctggttataactatctcggacccggaaacggtctcgatcgaggagagcctgtcaacagggcagacgaggtcgcgcgagagcacgacatctcgtacaacgagcagcttgaggcgggagacaacccctacctcaagtacaaccacgcggacgccgagtttcaggagaagctcgccgacgacacatccttcgggggaaacctcggaaaggcagtctttcaggccaagaaaagggttctcgaaccttttggcctggttgaagagggtgctaagacggcccctaccggaaagcggatagacgaccactttccaaaaagaaagaaggcccggaccgaagaggactccaagccttccacctcgtcagacgccgaagctggacccagcggatcccagcagctgcaaatcccagcccaaccagcctcaagtttgggagctgatacaatgtctgcgggaggtggcggcccattgggcgacaataaccaaggtgccgatggagtgggcaatgcctcgggagattggcattgcgattccacgtggatgggggacagagtcgtcaccaagtccacccgaacctgggtgctgcccagctacaacaaccaccagtaccgagagatcaaaagcggctccgtcgacggaagcaacgccaacgcctactttggatacagcaccccctgggggtactttgactttaaccgcttccacagccactggagcccccgagactggcaaagactcatcaacaactactggggcttcagaccccggtccctcagagtcaaaatcttcaacattcaagtcaaagaggtcacggtgcaggactccaccaccaccatcgccaacaacctcacctccaccgtccaagtgtttacggacgacgactaccagctgccctacgtcgtcggcaacgggaccgagggatgcctgccggccttccctccgcaggtctttacgctgccgcagtacggttacgcgacactgaaccgcgacaacacagaaaatcccaccgagaggagcagcttcttctgcctagagtactttcccagcaagatgctgagaacgggcaacaactttgagtttacctacaactttgaggaggtgcccttccactccagcttcgctcccagtcagaacctcttcaagctggccaacccgctggtggaccagtacttgtaccgcttcgtgagcacaaataacactggcggagtccagttcaacaagaacctggccgggagatacgccaacacctacaaaaactggttcccggggcccatgggccgaacccagggctggaacctgggctccggggtcaaccgcgccagtgtcagcgccttcgccacgaccaataggatggagctcgagggcgcgagttaccaggtgcccccgcagccgaacggcatgaccaacaacctccagggcagcaacacctatgccctggagaacactatgatcttcaacagccagccggcgaacccgggcaccaccgccacgtacctcgagggcaacatgctcatcaccagcgagagcgagacgcagccggtgaaccgcgtggcgtacaacgtcggcgggcagatggccaccaacaaccagagctccaccactgcccccgcgaccggcacgtacaacctccaggaaatcgtgcccggcagcgtgtggatggagagggacgtgtacctccaaggacccatctgggccaagatcccagagacgggggcgcactttcacccctctccggccatgggcggattcggactcaaacacccaccgcccatgatgctcatcaagagcacgcctgtgcccggaaatatcaccagcttctcggacgtgcccgtcagcagcttcatcacccagtacagcaccgggcaggtcaccgtggagatggagtgggagctcaagaaggaaaactccaagaggtggaacccagagatccagtacacaaacaactacaacgacccccagtttgtggactttgccccggacagcaccggggaatacagaaccaccagacctatcggaacccgataccttacccgacccctttaa

SEQ ID NO: 799 - DNA, 2175 bp, synthetic construct
  misc_feature 1..2175: note = source = /note="Description of Artificial Sequence: Synthetic polynucleotide"
  source 1..2175: mol_type = other DNA
atgtcttttgttgatcaccctccagattggttggaagaagttggtgaaggtcttcgcgagtttttgggccctgaagcgggcccaccgaaaccaaaacccaatcagcagcatcaagatcaagcccgtggtcttgtgctgcctggttataactatctcggacccggaaacggtctcgatcgaggagagcctgtcaacagggcagacgaggtcgcgcgagagcacgacatctcgtacaacgagcagcttgaggcgggagacaacccctacctcaagtacaaccacgcggacgccgagtttcaggagaagctcgccgacgacacatccttcgggggaaacctcggaaaggcagtctttcaggccaagaaaagggttctcgaaccttttggcctggttgaagagggtgctaagacggcccctaccggaaagcggatagacgaccactttccaaaaagaaagaaggtccggaccgaagaggactccaagccttccacctcgtcagacgccgaagctggacccagcggatcccagcagctgcaaatcccagcccaaccagcctcaagtttgggagctgatacaatgtctgcgggaggtggcggcccattgggcgacaataaccaaggtgccgatggagtgggcaatgcctcgggagattggcattgcgattccacgtggatgggggacagagtcgtcaccaagtccacccgaacctgggtgccgcccagctacaacaaccaccagtaccgagagatcaaaagcggctccgtcgacggaagcaacgccaacgcctactttggatacagcaccccctgggggtactttgactttaaccgcttccacagccactggagcccccgagactggcaaagactcatcaacaactactggggcttcagaccccggtccctcagagtcaaaatcttcaacattcaagtcaaagaggtcacggtgcaggactccaccaccaccatcgccaacaacctcacctccaccgtccaagtgtttacggacgacgactaccagctgccctacgtcgtcggcaacgggaccgagggatgcctgccggccttccctccgcaggtctttacgctgccgcagtacggttacgcgacgctgaaccgcgacaacacagaaaatcccaccgagaggagcagcttcttctgcctagagtactttcccagcaagatgctgagaacgggcaacaactttgagtttacctacaactttgaggaggtgcccttccactccagcttcgctcccagtcagaacctcttcaagctggccaacccgctggtggaccagtacttgtaccgcttcgtgagcacaaataacactggcggagtccagttcaacaagaacctggccgggagatacgccaacacctacaaaaactggttcccggggcccatgggccgaacccagggctggaacctgggctccggggtcaaccgcgccagtgtcagcgccttcgccacgaccaataggatggagctcgagggcgcgagttaccaggtgcccccgcagccgaacggcatgaccaacaacctccagggcagcaacacctatgccctggagaacactatgatcttcaacagccagccggcgaacccgggcaccaccgccacgtacctcgagggcaacatgctcatcaccagcgagagcgagacgcagccggtgaaccgcgtggcgtgcaacgtcggcgggcagatggccaccaacaaccagagctccaccactgcccccgcgaccggcacgtacaacctccaggaaatcgtgcccggcagcgtgtggatggagagggacgtgtacctccaaggacccatctgggccaagatcccagagacgggggcgcactttcacccctctccggccatgggcggattcggactcaaacacccaccgcccatgatgctcatcaagaacacgcctgtgcccggaaatatcaccagcttctcggacgtgcccgtcagcagcttcatcacccagtacagcaccgggcaggtcaccgtggagatggagtgggagctcaagaaggaaaactccaagaggtggaacccagagatccagtacacaaacaactacaacgacccccagtttgtggactttgccccggacagcaccggggaatacagaaccaccagacctattggaacccgataccttacccgacccctttaa

SEQ ID NO: 800 - DNA, 2175 bp, synthetic construct
  misc_feature 1..2175: note = source = /note="Description of Artificial Sequence: Synthetic polynucleotide"
  source 1..2175: mol_type = other DNA
atgtcttttgttgatcaccctccagattggttggaagaagttggtgaaggtcttcgcgagtttttgggccttgaagcgggcccaccgaaaccaaaacccaatcagcagcatcaagatcaagcccgtggtcttgtgctgcctggttataactatctcggacccggaaacggtctcgatcgaggagagcctgtcaacagggcagacgaggtcgcgcgagagcacgacatctcgtacaacgagcagcttgaggcgggagacaacccctacctcaagtacaaccacgcggacgccgagtttcaggagaagctcgccgacgacacatccttcgggggaaacctcggaaaggcagtctttcaggccaagaaaagggttctcgaaccttttggcctggttgaagagggtgctaagacggcccctaccggaaagcggatagacgaccactttccaaaaagaaagaaggcccggaccgaagaggactccaagccttccacctcgtcagacgccgaagctggacccagcggatcccagcagctgcaaatcccagcccaaccagcctcaagtttgggagctgatacaatgtctgcgggaggtggcggcccattgggcgacaataaccaaggtgccgatggagtgggcaatgcctcgggagattggcattgcgattccacgtggatgggggacagagtcgtcaccaagtccacccgaacctgggtgctgcccagctacaacaaccaccagtaccgagagatcaaaagcggctccgtcgacggaagcaacgccaacgcctactttggatacagcaccccctgggggtactttgactttaaccgcttccacagccactggagcccccgagactggcaaagactcatcaacaactactggggcttcagaccccggtccctcagagtcaaaatcttcaacattcaagtcaaagaggtcacggtgcaggactccaccaccaccatcgccaacaacctcacctccaccgtccaagtgtttacggacgacgactaccagctgccctacgtcgtcggcaacgggaccgagggatgcctgccggccttccctccgcaggtctttacgctgccgcagtacggttacgcgacgctgaaccgcgacaacaccgaaaatcccaccgagaggagcagcttcttctgcctagagtactttcccagcaagatgctgagaacgggcaacaactttgagtttacctacaactttgaggaggtgcccttccactccagcttcgctcccagtcagaacctcttcaagctggccaacccgctggtggaccagtacttgtaccgcttcgtgagcacaaataacactggcggagtccagttcaacaagaacctggccgggagatacgccaacacctacaaaaactggttcccggggcccatgggccgaacccagggctggaacctgggctccggggtcaaccgcgccagtgtcagcgccttcgccacgaccaataggatggagctcgagggcgcgagttaccaggtgcccccgcagccgaacggcatgaccaacaacctccagggcagcaacacctatgccctggagaacactatgatcttcaacagccagccggcgaacccgggcaccaccgccacgtacctcgagggcaacatgctcatcaccagcgagagcgagacgcagccggtgaaccgcgtggcgtacaacgtcggcgggcagatggccaccaacaaccagagctccaccactgcccccgcgaccggcgcgtacaacctccaggaaatcgtgcccggcagcgtgtggatggagagggacgtgtacctccaaggacccatctgggccaagatcccagagacgggggcgcactttcacccctctccggccatgggcggattcggactcaaacacccaccgcccatgatgctcatcaagaacacgcctgtgcccggaaatatcaccagcttctcggacgtgcccgtcagcagcttcatcacccagtacagcaccgggcaggtcaccgtggagatggagtgggagctcaagaaggaaaactccaagaggtggaacccagagatccagtacacaaacaactacaacgacccccagtttgtggactttgccccggacagcaccggggaatacagaaccaccagacctatcggaacccgataccttacccgacccctttaa

SEQ ID NO: 801 - DNA, 2175 bp, synthetic construct
  misc_feature 1..2175: note = source = /note="Description of Artificial Sequence: Synthetic polynucleotide"
  source 1..2175: mol_type = other DNA
atgtcttttgttgatcaccctccagattggttggaagaagttggtgaaggtcttcgcgagtttttgggccttgaagcgggcccaccgaaaccaaaacccaatcagcagcatcaagatcaagcccgtggtcttgtgctgcctggttataactatctcggacccggaaacggtctcgatcgaggagagcctgtcaacagggcagacggggtcgcgcgagagcacgacatctcgtacaacgagcagcttgaggcgggagacaacccctacctcaagtacaaccacgcggacgccgagtttcaggagaagctcgccgacgacacatccttcgggggaaacctcggaaaggcagtctttcaggccaagaaaagggttctcgaaccttttggcctggttgaagagggtgctaagacggcccctaccggaaagcggatagacgaccactttccaaaaagaaagaaggcccggaccgaagaggactccaagccttccacctcgtcagacgccgaagctggacccagcggatcccagcagctgcaaatcccagcccaaccagcctcaagtttgggagctgatacaatgtctgcgggaggtggcggcccattgggcgacaataaccaaggtgccgatggagtgggcaatgcctcgggagattggcattgcgattccacgtggatgggggacagagtcgtcaccaagtccacccgaacctgggtgctgcccagctacaacaaccaccagtaccgagagatcaaaagcggctccgtcgacggaagcaacgccaacgcctactttggatacagcaccccctgggggtactttgactttaaccgcttccacagccactggagcccccgagactggcaaagactcatcaacaactactggggcttcagaccccggtccctcagagtcaaaatcttcaacattcaagtcaaagaggtcacggtgcaggactccaccaccaccatcgccaacaacctcacctccaccgtccaagcgtttacggacgacgactaccagctgccctacgtcgtcggcaacgggaccgagggatgcctgccggccttccctccgcaggtctttacgctgccgcagtacggttacgcgacgctgaaccgcgacaacacagaaaatcccaccgagaggagcagcttcttctgcctagagtactttcccagcaagatgctgagaacgggcaacaactttgagtttacctacaactttgaggaggtgcccttccactccagcttcgctcccagtcagaacctcttcaagctggccaacccgctggtggaccagtacttgtaccgcttcgtgagcacaaataacactggcggagtccagttcaacaagaacctggccgggagatacgccaacacctacaaaaactggttcccggggcccatgggccgaacccagggctggaacctgggctccggggtcaaccgcgccagtgtcagcgccttcgccacgaccaataggatggagctcgagggcgcgagttaccaggtgcccccgcagccgaacggcatgaccaacaacctccagggcagcaacacctatgccctggagaacactatgatcttcaacagccagccggcgaacccgggcaccaccgccacgtacctcgagggcaacatgctcatcaccagcgagagcgagacgcagccggtgaaccgcgtggcgtacaacgtcggcgggcagatggccaccaacaaccagagctccaccactgcccccgcgaccggcacgtacaacctccaggaaatcgtgcccggcagcgtgtggatggagagggacgtgtacctccaaggacccatctgggccaagatcccagagacgggggcgcactttcacccctctccggccatgggcggattcggactcaaacacccaccgcccatgatgctcatcaagaacacgcctgtgcccggaaatatcaccagcttctcggacgtgcccgtcagcagcttcatcacccagtacagcaccgggcaggtcaccgtggagatggagtgggagctcaagaaggaaaactccaagaggtggaacccagagatccagtacacaaacaactacaacgacccccagtttgtggactttgccccggacagcaccggggaatacagaaccaccagacctatcggaacccgataccttacccgacccctttaa

SEQ ID NO: 802 - DNA, 2175 bp, synthetic construct
  misc_feature 1..2175: note = source = /note="Description of Artificial Sequence: Synthetic polynucleotide"
  source 1..2175: mol_type = other DNA
atgtcttttgttgatcaccctccagattggttggaagaagttggtgaaggtcttcgcgagtttttgggccttgaagcgggcccaccgaaaccaaaacccaatcagcagcatcaagatcaagcccgtggtcttgtgctgcctggttataactatctcggacccggaaacggtctcgatcgaggagagcctgtcaacagggcagacgaggtcgcgcgagagcacgacatctcgtacaacgagcagcttgaggcgggagacaacccctacctcaagtacaaccacgcggacgccgagtttcaggagaagctcgccgacgacacatccttcgggggaaacctcggaaaggcagtctttcaggccaagaaaagggttctcgaaccttttggcctggttgaagagggtgctaagacggcccctaccggaaagcggatagacgaccactttccaaaaagaaagaaggcccggaccgaagaggactccaagccttccacctcgtcagacgccgaagctggacccagcggatcccagcagctgcaaatcccagcccaaccagcctcaagtttgggagctgatacaatgtctgcgggaggtggcggcccattgggcgacaataaccaaggtgccgatggagtgggcaatgcctcgggagattggcattgcgattccacgtggatgggggacagagtcgtcaccaagtccacccgaacctgggtgctgcccagctacaacaaccaccagtaccgagagatcaaaagcggctccgtcgacggaagcaacgccaacgcctactttggatacagcaccccctgggggtactttgactttaaccgcttccacagccactggagcccccgagactggcaaagactcatcaacaactactggggcttcagaccccggtccctcagagtcaaaatcttcaacattcaagtcaaagaggtcacggtgcaggactccaccaccaccatcgccaacaacctcacctccaccgtccaagtgtttacggacgacgactaccagctgccctacgtcgtcggcaacgggaccgagggatgcctgccggccttccctccgcaggtctttacgctgccgcagtacggttacgcgacgctgaaccgcgacaacacagaaaatcccaccgagaggagcagcttcttctgcctagagtactttcccagcaagatgctgagaacgggcaacaactttgagtttacctacaactttgaggaggtgcccttccactccagcttcgctcccagtcagaacctcttcaagctggccaacccgctggtggaccagtacttgtaccgcttcgtgagcacaaataacactggcggagtccagttcaacaagaacctggccgggagatacgccaacacctacaaaaactggttcccggggcccatgggccgaacccagggctggaacctgggctccggggtcaaccgcgccagtgtcagcgccttcgccacgaccaataggatggagctcgagggcgcgagttactaggtgcccccgcagccgaacggcatgaccaacaacctccagggcagcaacacctatgccctggagaacactatgatcttcaacagccagccggcgaacccgggcaccaccgccacgtacctcgagggcaacatgctcatcaccagcgagagcgagacgcagccggtgaaccgcgtggcgtacaacgtcggcgggcagatggccaccaacaaccagagctccaccactgcccccgcgaccggcacgtacaacctccaggaaatcgtgcccggcagcgtgtggatggagggggacgtgtacctccaaggacccatctgggccaagatcccagagacgggggcgcactttcacccctctccggccatgggcggattcggactcaagcacccaccgcccatgatgctcatcaagaacacgcctgtgcccggaaatatcaccagcttctcggacgtgcccgtcagcagcttcatcacccagtacagcaccgggcaggtcaccgtggagatggagtgggagctcaagaaggaaaactccaagaggtggaacccagagatccagtacacaaacaactacaacgacccccagtttgtggactttgccccggacagcaccggggaatacagaaccaccagacctatcggaacccgataccttacccgacccctttaa

SEQ ID NO: 803 - DNA, 2175 bp, synthetic construct
  misc_feature 1..2175: note = source = /note="Description of Artificial Sequence: Synthetic polynucleotide"
  source 1..2175: mol_type = other DNA
atgtcttttgttgatcaccctccagattggttggaagaagttggtgaaggtcttcgcgagtttttgggccttgaagcgggcccaccgaaaccaaaacccaatcagcagcatcaagatcaagcccgtggtcttgtgctgcctggttataactatctcggacccggaaacggtctcgatcgaggagagcctgtcaacagggcagacgaggtcgcgcgagagcacgacatctcgtacaacgagcagcttgaggcgggagacaacccctacctcaagtacaaccacgcggacgccgagtttcaggagaagctcgccgacgacacatccttcgggggaaacctcggaaaggcagtctttcaggccaagaaaagggttctcgaaccttttggcctggttgaagagggtgctaagacggcccctaccggaaagcggatagacgaccactttccaaaaagaaagaaggtccggaccgaagaggactccaagccttccacctcgtcagacgccgaagctggacccagcggatcccagcagctgcaaatcccagcccaaccagcctcaagtttgggagctgatacaatgtctgcgggaggtggcggcccattgggcgacaataaccaaggtgccgatggagtgggcaatgcctcgggagattggcattgcgattccacgtggatgggggacagagtcgtcaccaagtccacccgaacctgggtgctgcccagctacaacaaccaccagtaccgagagatcaaaagcggctccgtcgacggaagcaacgccaacgcctactttggatacagcaccccctgggggtactttgactttaaccgcttccacagccactggagcccccgagactggcaaagactcatcaacaactactggggcttcagaccccggtccctcagagtcaaaatcttcaacattcaagtcaaagaggtcacggtgcaggactccaccaccaccatcgccaacaacctcacctccaccgtccaagtgtttacggacgacgactaccagctgccctacgtcgtcggcaacgggaccgagggatgcctgccggccttccctccgcaggtctttacgctgccgcagtacggttacgcgacgctgaaccgcgacaacacagaaaatcccaccgagaggagcagcttcttctgcctagagtactttcccagcaagatgctgagaacgggcaacaactttgagtttacctacaactttgaggaggtgcccttccactccagcttcgctcccagtcagaacctcttcaagctggccaacccgctggtggaccagtacttgtaccgcttcgtgagcacaaataacactggcggagtccagttcaacaagaacctggccgggagatacgccaacacctacaaaaactggttcccggggcccatgggccgaacccagggctggaacctgggctccggggtcaaccgcgccagtgtcagcgccttcgccacgaccaataggatggagctcgagggcgcgagttaccaggtgcccccgcagccgaacggcatgaccaacaacctccagggcagcaacacctatgccctggagaacactatgatcttcaacagccagccggcgaacccgggcaccaccgccacgtacctcgagggcaacatgctcatcaccagcgagagcgagacgcagccggtgaaccgcgtggcgtacaacgtcggcgggcagatggccaccaacaaccagagctccaccactgcccccgcgaccggcacgtacaacctccaggaaatcgtgcccggcagcgtgtggatggagagggacgtgtacctccaaggacccatctgggccaagatcccagagacgggggcgcactttcacccctctccggccatgggcggattcggactcaaacacccaccgcccatgatgctcatcaagaacacgcctgtgcccggaaatatcaccagcttctcggacgtgcccgtcagcagcttcatcacccagtacagcaccgggcaggtcaccgtggagatggagtgggagctcaagaaggaaaactccgagaggtggaacccagagatccagtacacaaacaactacaacgacccccagtttgtggactttgccccggacagcaccggggaatacagaaccaccagacctattggaacccgataccttacccgacccctttaa

SEQ ID NO: 804 - DNA, 2175 bp, synthetic construct
  misc_feature 1..2175: note = source = /note="Description of Artificial Sequence: Synthetic polynucleotide"
  source 1..2175: mol_type = other DNA
atgtcttttgttgatcaccctccagattggttggaagaagttggtgaaggtcttcgcgagtttttgggccttgaagcgggcccaccgaaaccaaaacccaatcagcagcatcaagatcaagcccgtggtcttgtgctgcctggttataactatctcggacccggaaacggtctcgatcgaggagagcctgtcaacagggcagacgaggtcgcgcgagagcacgacatctcgtacagcgagcagcttgaggcgggagacaacccctacctcaagtacaaccacgcggacgccgagtttcaggagaagctcgccgacgacacatccttcgggggaaacctcggaaaggcagtctttcaggccaagaaaagggttctcgaaccttttggcctggttgaagagggtgctaagacggcccctaccggaaagcggatagacgaccactttccaaaaagaaagaaggcccggaccgaagaggactccaagccttccacctcgtcagacgccgaagctggacccagcggatcccagcagctgcaaatcccagcccaaccagcctcaagtttgggagctgatacaatgtctgcgggaggtggcggcccattgggcgacaataaccaaggtgccgatggagtgggcaatgcctcgggagattggcattgcgattccacgtggatgggggacagagtcgtcaccaagtccacccgaacctgggtgctgcccagctacaacaaccaccagtaccgagagatcaaaagcggctccgtcgacggaagcaacgccaacgcctactttggatacagcaccccctgggggtactttgactttaaccgcttccacagccactggagcccccgagactggcaaagactcatcaacaactactggggcttcagaccccggtccctcagagtcaaaatcttcaacattcaagtcaaagaggtcacggtgcaggactccaccaccaccatcgccaacaacctcacctccaccgtccaagtgtttacggacgacgactaccagctgccctacgtcgtcggcaacgggaccgagggatgcctgccggccttccctccgcaggtctttacgctgccgcagtacggttacgcgacgctgaaccgcgacaacacagaaaatcccaccgagaggagcagcttcttctgcctagagtactttcccagcaagatgctgagaacgggcaacaactttgagtttacctacaactttgaggaggtgcccttccactccagcttcgctcccagtcagaacctcttcaagctggccaacccgctggtggaccagtacttgtaccgcttcgtgagcacaaataacactggcggagtccagttcaacaagaacctggccgggagatacgccaacacctacaaaaactggttcccggggcccatgggccgaacccagggctggaacctgggctccggggtcaaccgcgccagtgtcagcgccttcgccacgaccaataggatggagctcgagggcgcgagttaccaggtgcccccgcagccgaacggcatgaccaacaacctccagggcagcaacacctatgccctggagaacactatgatcttcaacagccagccggcgaacccgggcaccaccgccacgtacctcgagggcaacatgctcatcaccagcgagagcgagacgcagccggtgaaccgcgtggcgtacaacgtcggcgggcagatggccaccaacaaccagagctccaccactgcccccgcgaccggcacgtacaacctccaggaaatcgtgcccggcagcgtgtggatggagagggacgtgtacctccaaggacccatctgggccaagatcccagagacgggggcgcactttcacccctctccggccatgggcggattcggactcaaacacccaccgcccatgatgctcatcaagaacacgcctgtgcccggaaatatcaccagcttctcggacgtgcccgtcagcagcttcatcacccagtacagcaccgggcaggtcaccgtggagatggagtgggagctcaagaaggaaaactccaagaggtggaacccagagatccagtacacaaacaactacaacgacccccagtttgtggactttgccccggacagcaccggggaatacagaaccgccagacctatcggaacccgataccttacccgacccctttaa

SEQ ID NO: 805 - DNA, 2175 bp, synthetic construct
  misc_feature 1..2175: note = source = /note="Description of Artificial Sequence: Synthetic polynucleotide"
  source 1..2175: mol_type = other DNA
atgtcttttgttgatcaccctccagattggttggaagaagttggtgaaggtcttcgcgagtttttgggccctgaagcgggcccaccgaaaccaaaacccaatcagcagcatcaagatcaagcccgtggtcttgtgctgcctggttataactatctcggacccggaaacggtctcgatcgaggagagcctgtcaacagggcagacgaggtcgcgcgagagcacgacatctcgtacaacgagcagcttgaggcgggagacaacccctacctcaagtacaaccacgcggacgccgagtttcaggagaagctcgccgacgacacatccttcgggggaaacctcggaaaggcagtctttcaggccaagaaaagggttctcgaaccttttggcctggttgaagagggtgctaagacggcccctaccggaaagcggatagacgaccactttccaaaaagaaagaaggcccggaccgaagaggactccaagccttccacctcgtcagacgccgaagctggacccagcggatcccagcagctgcaaatcccagcccaaccagcctcaagtttgggagctgatacaatgtctgcgggaggtggcggcccattgggcgacaataaccaaggtgccgatggagtgggcaatgcctcgggagattggcattgcgattccacgtggatgggggacagagtcgtcaccaagtccacccgaacctgggtgctgcccagctacaacaaccaccagtaccgagagatcaaaagcggctccgtcgacggaagcaacgccaacgcctactttggatacagcaccccctgggggtactttgactttaaccgcttccacagccactggagcccccgagactggcaaagactcatcaacaactactggggcttcagaccccggtccctcagagtcaaaatcttcaacattcaagtcaaagaggtcacggtgcaggactccaccaccaccatcgccaacaacctcacctccaccgtccaagtgtttacggacgacgactaccagctgccctacgtcgtcggcaacgggaccgagggatgcctgccggccttccctccgcaggtctttacgctgccgcagtacggttacgcgacgctgaaccgcgacaacacagaaaatcccaccgagaggagcagcttcttctgcctagagtactttcccagcaagatgctgagaacgggcaacaactttgagtttacctacaactttgaggaggtgcccttccactccagcttcgctcccagtcagaacctcttcaagctggccaacccgctggtggaccagtacttgtaccgcttcgtgagcacaaataacactggcggagtccagttcaacaagaacctggccgggagatacgccaacacctacaaaaactggttcccggggcccatgggccgaacccagggctggaacctgggctccggggtcaaccgcgccagtgtcagcgccttcgccacgaccaataggatggagctcgagggcgcgagttaccaggtgcccccgcagccgaacggcatgaccaacaacctccagggcagcaacacctatgccctggagaacactatgatcttcaacagccagccggcgaacccgggcaccaccgccacgtacctcgagggcaacatgctcatcaccagcgagagcgagacgcagccggtgaaccgcgtggcgtacaacgtcggcgggcagatgaccaccaacaaccagagctccaccactgcccccgcgaccggcacgtacaacctccaggaaatcgtgcccggcagcgtgtggatggagagggacgtgtacccccaaggacccatctgggccaagatcccagagacgggggcgcactttcacccctctccggccatgggcggattcggactcaaacacccaccgcccatgatgctcatcaagaacacgcctgtgcccggaaatatcaccagcttctcggacgtgcccgtcagcagcttcatcacccagtacagcaccgggcaggtcaccgtggagatggagtgggagctcaagaaggaaaactccaagaggtggaacccagagatccagtacacaaacaactacaacgacccccagtttgtggactttgccccggacagcaccggggaatacaggaccaccagacctatcggaacccgataccttacccgacccctttaa

SEQ ID NO: 806 - DNA, 2175 bp, synthetic construct
  misc_feature 1..2175: note = source = /note="Description of Artificial Sequence: Synthetic polynucleotide"
  source 1..2175: mol_type = other DNA
atgtcttttgttgatcaccctccagattggttggaagaagttggtgaaggtcttcgcgagtttttgggccttgaagcgggcccaccgaaaccaaaacccaatcagcagcatcaagatcaagcccgtggtcttgtgctgcctggttataactatctcggacccggaaacggtctcgatcgaggagagcctgtcaacagggcagacgaggtcgcgcgagagcacgacatctcgtacaacgagcagcttgaggcgggagacaacccctacctcaagtacaaccacgcggacgccgagtttcaggagaagctcgccgacgacacatccttcgggggaaacctcggaaaggcagtctttcaggccaagaaaagggttctcgaaccttttggcctggttgaagagggtgctaagacggcccctaccggaaagcggatagacgaccactttccaaaaagaaagaaggcccggaccgaagaggactccaagccttccacctcgtcagacgccgaagctggacccagcggatcccagcagctgcaaatcccagcccaaccagcctcaagtttgggagctgatacaatgtctgcgggaggtggcggcccattgggcgacaataaccaaggtgccgatggagtgggcaatgcctcgggagattggcattgcgattccacgtggatgggggacagagtcgtcaccaagtccacccgaacctgggtgctgcccagctacaacaaccaccagtaccgagagatcaaaagcggctccgtcgacggaagcaacgccaacgcctactttggatacagcaccccctgggggtactttgactttaaccgcttccacagccactggagcccccgagactggcaaagactcatcaacaactactggggcttcagaccccggtccctcagagtcaaaatcttcaacattcaagtcaaagaggtcacggtgcaggactccaccaccaccatcgccaacaacctcacctccaccgtccaagtgtttacggacgacgactaccagctgccctacgtcgtcggcaacgggaccgagggatgcctgccggccttccctccgcaggtctttacgctgccgcagtacggttacgcgacgctgaaccgcgacaacacagaaaatcccaccgagaggagcagcttcctctgcctagagtactttcccagcaagatgctgagaacgggcaacaactttgagtttacctacaactttgaggaggtgcccttccactccagcttcgctcccagtcagaacctcttcaagctggccaacccgctggtggaccagtacttgtaccgcttcgtgagcacaaataacactggcggagtccagttcaacaagaacctggccgggagatacgccaacacctacaaaaactggttcccggggcccatgggccgaacccagggctggaacctgggctccggggtcaaccgcgccagtgtcagcgccttcgccacgaccaataggatggagctcgagggcgcgagttaccaggtgcccccgcagccgaacggcatgaccaacaacctccagggcagcaacacctatgccctggagaacactatgatcttcaacagccagccggcgaacccgggcaccaccgccacgtacctcgagggcaacatgctcatcaccagcgagagcgagacgcagccggtgaaccgcgtggcgtacaacgtcggcgggcagatggccaccaacaaccagagctccaccactgcccccgcgaccggcacgtacaacctccaggaaatcgtgcccggcagcgtgtggatgaagagggacgtgtacctccaaggacccatctgggccaagatcccagagacgggggcgcactttcacccctctccggccatgggcggattcggactcaaacacccaccgcccatgatgctcatcaagaacacgcctgtgcccggaaatatcaccagcttctcggacgtgcccgtcagcagcttcatcacccagtacagcaccgggcaggtcaccgtggagatggagtgggagctcaagaaggaaaactccaagaggtggaacccagagatccagtacacaaacaactacaacgacccccagtttgtggactttgccccggacagcaccggggaatacagaaccaccagacctatcggaacccgataccttacccgacccctttaa

SEQ ID NO: 807 - DNA, 2175 bp, synthetic construct
  misc_feature 1..2175: note = source = /note="Description of Artificial Sequence: Synthetic polynucleotide"
  source 1..2175: mol_type = other DNA
atgtcttttgttgatcaccctccagattggttggaagaagttggtgaaggtcttcgcgagtttttgggccttgaggcgggcccaccgaaaccaaaacccaatcagcagcatcaagatcaagcccgtggtcttgtgctgcctggttataactatctcggacccggaaacggtctcgatcgaggagagcctgtcaacagggcagacgaggtcgcgcgagagcacgacatctcgtacaacgagcagcttgaggcgggagacaacccctacctcaagtacaaccacgcggacgccgagtttcaggagaagctcgccgacgacacatccttcgggggaaacctcggaaaggcagtctttcaggccaagaaaagggttctcgaaccttttggcctggttgaagagggtgctaagacggcccctaccggaaagcggatagacgaccactttccaaaaagaaagaaggcccggaccgaagaggactccaagccttccaccccgtcagacgccgaagctggacccagcggatcccagcagctgcaaatcccagcccaaccagcctcaagtttgggagctgatacaatgtctgcgggaggtggcggcccattgggcgacaataaccaaggtgccgatggagtgggcaatgcctcgggagattggcattgcgattccacgtggatgggggacagagtcgtcaccaagtccacccgaacctgggtgctgcccagctacaacaaccaccagtaccgagagatcaaaagcggctccgtcgacggaagcaacgccaacgcctactttggatacagcaccccctgggggtactttgactttaaccgcttccacagccactggagcccccgagactggcaaagactcatcaacaactactggggcttcagaccccggtccctcagagtcaaaatcttcaacattcaagtcaaagaggtcacggtgcaggactccaccaccaccatcgccaacaacctcacctccaccgtccaagtgtttacggacgacgactaccagctgccctacgtcgtcggcaacgggaccgagggatgcctgccggccttccctccgcaggtctttacgctgccgcagtacggttacgcgacgctgaaccgcgacaacacagaaaatcccaccgagaggagcagcttcttctgcctagagtactttcccagcaagatgctgagaacgggcaacaactttgagtttacctacaactttgaggaggtgcccttccactccagcttcgctcccagtcagaacctcttcaagctggccaacccgctggtggaccagtacttgtaccgcttcgtgagcacaaataacactggcggagtccagttcaacaagaacctggccgggagatacgccaacacctacaaaaactggttcccggggcccatgggccgaacccagggctggaacctgggctccggggtcaaccgcgccagtgtcagcgccttcgccacgaccaataggatggagctcgagggcgcgagttaccaggtgcccccgcagccgaacggcatgaccaacaacctccagggcagcaacacctatgccctggagaacactatgatcttcaacagccagccggcgaacccgggcaccaccgccacgtacctcgagggcaacatgctcatcaccagcgagagcgagacgcagccggtgaaccgcgtggcgtacaacgtcggcgggcagatggccaccaacaaccagagctccaccactgcccccgcgaccggcacgtacaacctccaggaaatcgtgcccggcagcgtgtggatggagagggacgtgtacctccaaggacccatctgggccaagatcccagagacgggggcgcactttcacccctctccggccatgggcggattcggactcaaacacccaccgcccatgatgctcatcaagaacacgcctgtgcccggaaatatcaccagcttctcggacgtgcccgtcagcagcttcatcacccagtacagcaccgggcaggtcaccgtggagatggagtgggagctcaagaaggaaaactccaagaggtggaacccagagatccagtacacaaacaactacaacgacccccagtttgtggactttgccccggacagcaccggggaatacagaaccaccagacctatcggaacccgataccttacccgacccctttaa

SEQ ID NO: 808 - DNA, 2175 bp, synthetic construct
  misc_feature 1..2175: note = source = /note="Description of Artificial Sequence: Synthetic polynucleotide"
  source 1..2175: mol_type = other DNA
atgtcttttgttgatcaccctccagattggttggaagaagttggtgaaggtcttcgcgagtttttgggccttgaagcgggcccaccgaaaccaaaacccaatcagcagcatcaagatcaagcccgtggtcttgtgctgcctggttataactatctcggacccggaaacggtctcgatcgaggagagcctgtcaacagggcagacgaggtcgcgcgagagcacgacatctcgtacaacgagcagcttgaggcgggagacaacccctacctcaagtacaaccacgcggacgccgagtttcaggagaagctcgccgacgacacatccttcgggggaaacctcggaaaggcagtctttcaggccaagaaaagggttctcgaaccttttggcctggttgaagagggtgctaagacggcccctaccggaaagcggatagacgaccactttccaaaaagaaagaaggcccggaccgaagaggactccaagccttccacctcgtcagacgccgaagctggacccagcggatcccagcagctgcaaatcccagcccaaccagcctcaagtttgggagctgatacaatgtctgcgggaggtggcggcccattgggcgacaataaccaaggtgccgatggagtgggcaatgcctcgggagattggcattgcgattccacgtggatgggggacagagtcgtcaccaagtccacccgaacctgggtgctgcccagctacaacaaccaccagtaccgagagatcaaaagcggctccgtcgacggaagcaacgccaacgcctactttggatacagcaccccctgggggtactttgactttaaccgcttccacagccactggagcccccgagactggcaaagactcatcaacaactactggggcttcagaccccggtccctcagagtcaaaatcttcaacattcaagtcaaagaggtcacggtgcaggactccaccaccaccatcgccaacaacctcacctccaccgtccaagtgtttacggacgacgactaccagctgccctacgtcgtcggcaacgggaccgagggatgcctgccggccttccctccgcaggtctttacgctgccgcagtacggttacgcgacgctgaaccgcgacaacacagaaaatcccaccgagaggagcagcttcttctgcctagagtactttcccagcaagatgctgagaacgggcaacaactttgagtttacctacaactttgaggaggtgcccttccactccagcttcgctcccagtcagaacctcttcaagctggccaacccgctggtggaccagtacttgtaccgcttcgtgagcacaaataacactggcggagtccagttcaacaagaacctggccgggagatacgccaacacccacaaaaactggttcccggggcccatgggccgaacccagggctggaacctgggctccggggtcaaccgcgccagtgtcagcgccttcgccacgaccaataggatggagctcgagggcgcgagttaccaggtgcccccgcagtcgaacggcatgaccaacaacctccggggcagcaacacctatgccctggagaacactatgatcttcaacagccagccggcgaacccgggcaccaccgccacgtacctcgagggcaacatgctcatcaccagcgagagcgagacgcagccggtgaaccgcgtggcgtacaacgtcggcgggcagatggccaccaacaaccagagctccaccactgcccccgcgaccggcacgtacaacctccaggaaatcgtgcccggcagcgtgtggatggagagggacgtgtacctccaaggacccatctgggccaagatcccagagacgggggcgcactttcacccctctccggccatgggcggattcggactcaaacacccaccgcccatgatgctcatcaagaacacgcctgtgcccggaaatatcaccagcttctcggacgtgcccgtcagcagcttcatcacccagtacagcaccgggcaggtcaccgtggagatggagtgggagctcaagaaggaaaactccaagaggtggaacccagagatccagtacacaaacaactacaacgacccccagtttgtggactttgccccggacagcaccggggaatacagaaccaccagacctatcggaacccgataccttacccgacccctttaa

SEQ ID NO: 809 - DNA, 2175 bp, synthetic construct
  misc_feature 1..2175: note = source = /note="Description of Artificial Sequence: Synthetic polynucleotide"
  source 1..2175: mol_type = other DNA
atgtcttttgttgatcaccctccagattggttggaagaagttggtgaaggtcttcgcgagtttttgggccttgaagcgggcccaccgaaaccaaaacccaatcagcagcatcaagatcaagcccgtggtcttgtgctgcctggttataactatctcggacccggaaacggtctcgatcgaggagagcctgtcaacagggcagacgaggtcgcgcgagagcacgacatctcgtacaacgagcagcttgaggcgggagacaacccctacctcaagtacaaccacgcggacgccgagtttcaggagaagctcgccgacgacacatccttcgggggaaacctcggaaaggcagtctttcaggccaagaaaagggttctcgaaccttttggcctggttgaagagggtgctaagacggcccctaccggaaagcggatagacgaccactttccaaaaagaaagaaggcccggaccgaagaggactccaagccttccacctcgtcagacgccgaagctggacccagcggatcccagcagctgcaaatcccagcccaaccagcctcaagtttgggagctgatacaatgtctgcgggaggtggcggcccattgggcgacaataaccaaggtgccgatggagtgggcaatgcctcgggagattggcattgcgattccacgtggatgggggacagagtcgtcaccaagtccacccgaacctgggtgctgcccagctacaacaaccaccagtaccgagagatcaaaagcggctccgtcgacggaagcaacgccaacgcctactttggatacagcaccccctgggggtactttgactttaaccgcttccacagccactggagcccccgagactggcaaagactcatcaacaactactggggcttcagaccccggtccctcagagtcaaaatcttcaacattcaagtcaaagaggtcacggtgcaggactccaccaccaccatcgccaacaacctcacctccaccgtccaagtgtttacggacgacgactaccagctgccctacgtcgtcggcaacgggaccgagggatgcctgccggccttccctccgcaggtctttacgctgccgcagtacggttacgcgacgctgaaccgcgacaacacagaaaatcccaccgagaggagcagcttcttctgcctagagtactttcccagcaagatgctgagaacgggcaacaactttgagtttacctacaactttgaggaggtgcccttccactccagcttcgctcccagtcagaacctcttcaagctggccaacccgctggtggaccagtacttgtaccgcttcgtgagcacaaataacactggcggagtccagttcaacaagaacctggccgggagatacgccaacacctacaaaaactggttcccggggcccatgggccgaacccagggctggaacctgggctccggggtcaaccgcgccagtgtcagcgccttcgccacgaccaataggatggagctcgagggcgcgagttaccaggtgcccccgcagccgaacggcatgaccaacaacctccagggcagcaacacctatgccctggagaacactatgatcttcaacagccagccggcgaacccgggcaccaccgccacgtacctcgagggcaacatgctcatcaccagcgagagcgagacgcagccggtgaaccgcgtggcgtacagcgtcggcgggcagatggccaccaacaaccagagctccaccactgcccccacgaccggcacgtacaacctccaggaaatcgtgcccggcagcgtgtggatggagagggacgtgtacctccaaggacccatctgggccaagatcccagagacgggggcgcactttcacccctctccggccatgggcggattcagactcaaacacccaccgcccatgatgctcatcaagaacacgcctgtgcccggaaatatcaccagcttctcggacgtgcccgtcagcagcttcatcacccagtacagcaccgggcaggtcaccgtggagatggagtgggagctcaagaaggaaaactccaagaggtggaacccagagatccagtacacaaacaactacaacgacccccagtttgtggactttgccccggacagcaccggggaatacagaaccaccagacctatcggaacccgataccttacccgacccctttaa

SEQ ID NO: 810 - DNA, 2175 bp, synthetic construct
  misc_feature 1..2175: note = source = /note="Description of Artificial Sequence: Synthetic polynucleotide"
  source 1..2175: mol_type = other DNA
atgtcttttgttgatcaccctccagattggttggaagaagttggtgaaggtcttcgcgagtttttgggccttgaagcgggcccaccgaaaccaaaacccaatcagcagcatcaagatcaagcccgtggtcttgtgctgcctggttataactatctcggacccggaaacggtctcgatcgaggagagcctgtcaacagggcagacgaggtcgcgcgagagcacgacatctcgtacaacgagcagcttgaggcgggagacaacccctacctcaagtacaaccacgcggacgccgagtttcaggagaagctcgccgacgacacatccttcgggggaaacctcggaaaggcagtctttcaggccaagaaaagggttctcgaaccttttggcctggttgaagagggtgctaagacggcccctaccggaaagcggatagacgaccactttccaaaaagaaagaaggcccggaccgaagaggactccaagccttccacctcgtcagacgccgaagctggacccagcggatcccagcagctgcaaatcccagcccaaccagcctcaagtttgggagctgatacaatgtctgcgggaggtggcggcccattgggcgacaataaccaaggtgccgatggagtgggcaatgcctcgggagattggcattgcgattccacgtggatgggggacagagtcgtcaccaagtccacccgaacctgggtgctgcccagctacaacaaccaccagtaccgagagatcaaaagcggctccgtcgacggaagcaacgccaacgcctactttggatacagcaccccctgggggtactttgactttaaccgcttccacagccactggagcccccgagactggcaaagactcatcaacaactactggggcttcagaccccggtccctcagagtcaaaatcttcaacattcaagtcaaagaggtcacggtgcaggactccaccaccaccatcgccaacaacctcacctccaccgtccaagtgtttacggacgacgactaccagctgccctacgtcgtcggcaacgggaccgagggatgcctgccggccttccctccgcaggtctttacgctgccgcagtacggttacgcgacgctgaaccgcgacaacacagaaaatcccaccgagaggagcagcttcttctgcctagagtactttcccagcaagatgctgagaacgggcaacaactttgagtttacctacaactttgaggaggtgcccttccactccagcttcgctcccagtcagaacctcttcaagctggccaacccgctggtggaccagtacttgtaccgcttcgtgagcacaaataacactggcggagtccagttcaacaagaacctggccgggagatacgccaacacctacaaaaactggttcccggggcccatgggccgaacccagggctggaacctgggctccggggtcaaccgcgccagtgtcagcgccttcgccgcgaccaataggatggagctcgagggcgcgagttaccaggtgcccccgcagccgaacggcatgaccaacaacctccagggcagcaacacctatgccctggagaacactatgatcttcaacagccagccggcgaacccgggcaccaccgccacgtacctcgagggcaacatgctcatcaccagcgagagcgagacgcagccggtgaaccgcgtggcgtacaacgtcggcgggcagatggccaccaacaaccagagctccaccactgcccccgcgaccggcacgtacaacctccaggaaatcgtgcccggcggcgtgtggatggagagggacgtgtacctccaaggacccatctgggccaagatcccagagacgggggcgcactttcacccctctccggccatgggcggattcggactcaaacacccaccgcccatgatgctcatcaagaacacgcctgtgcccggaaataccaccagcttctcggacgtgcccgtcagcagcttcatcacccagtacagcaccgggcaggtcaccgtggagatggagtgggagctcaagaaggaaaactccaagaggtggaacccagagatccagtacacaaacaactacaacgacccccagtttgtggactttgccccggacagcaccggggaatacagaaccaccagacctatcggaacccgataccttacccgacccctttaa

SEQ ID NO: 811 - DNA, 2175 bp, synthetic construct
  misc_feature 1..2175: note = source = /note="Description of Artificial Sequence: Synthetic polynucleotide"
  source 1..2175: mol_type = other DNA
atgtcttttgttgatcaccctccagattggttggaagaagttggtgaaggtcttcgcgagtttttgggccttgaagcgggcccaccgaaaccaaaacccaatcagcagcatcaagatcaagcccgtggtcttgtgctgcctggttataactatctcggacccggaaacggtctcgatcgaggagagcctgtcaacagggcagacgaggtcgcgcgagagcacgacatctcgtacaacgagcagcttgaggcgggagacaacccctacctcaagtacaaccacgcggacgccgagtttcaggagaagctcgccgacgacacatccttcgggggaaacctcggaaaggtagtctttcaggccaagaaaagggttctcgaaccttttggcctggttgaagagggtgctaagacggcccctaccggaaagcggatagacgaccactttccaaaaagaaagaaggcccggaccgaagaggactccaagccttccacctcgtcagacgccgaagctggacccagcggatcccagcagctgcaaatcccagcccaaccagcctcaagtttgggagctgatacaatgtctgcgggaggtggcggcccattgggcggcaataaccaaggtgccgatggagtgggcaatgcctcgggagattggcattgcgattccacgtggatgggggacagagtcgtcaccaagtccacccgaacctgggtgctgcccagctacaacaaccaccagtaccgagagatcaaaagcggctccgtcgacggaagcaacgccaacgcctactttggatacagcaccccctgggggtactttgactttaaccgcttccacagccactggggcccccgagactggcaaagactcatcaacaactactggggcttcagaccccggtccctcagagtcaaaatcttcaacattcaagtcaaagaggtcacggtgcaggactccaccaccaccatcgccaacaacctcacctccaccgtccaagtgtttacggacgacgactaccagctgccctacgtcgtcggcaacgggaccgagggatgcctgccggccttccctccgcaggtctttacgctgccgcagtacggttacgcgacgctgaaccgcgacaacacagaaaatcccaccgagaggagcagcttcttctgcctagagtactttcccagcaagatgctgagaacgggcaacaactttgagtttacctacaactttgaggaggtgcccttccactccagcttcgctcccagtcagaacctcttcaagctggccaacccgctggtggaccagtacttgtaccgcttcgtgagcacaaataacactggcggagtccagttcaacaagaacctggccgggagatacgccaacacctacaaaaactggttcccggggcccatgggccgaacccagggctggaacctgggctccggggtcaaccgcgccagtgtcagcgccctcgccacgaccaataggatggagctcgagggcgcgagttaccaggtgcccccgcagccgaacggcatgaccaacaacctccagggcagcaacacctatgccctggagaacactatgatcttcaacagccagccggcgaacccgggcaccaccgccacgtacctcgagggcaacatgctcatcaccagcgagagcgagacgcagccggtgaaccgcgtggcgtacaacgtcggcgggcagatggccaccaacaaccagagctccaccactgcccccgcgaccggcacgtacaacctccaggaaatcgtgcccggcagcgtgtggatggagagggacgtgtacctccaaggacccatctgggccaagatcccagagacgggggcgcactttcacccctctccggccatgggcggattcggactcaaacacccaccgcccatgatgctcatcaagaacacgcctgtgcccggaaatatcaccagcttctcggacgtgcccgtcagcagcttcatcacccagtacagcaccgggcaggtcaccgtggagatggagtgggagctcaagaaggaaaactccaagaggtggaacccagagatccagtacacaaacaactacaacgacccccagtttgtggactttgccccggacagcaccggggaatacagaaccaccagacctatcggaacccgataccttacccgacccctttaa

SEQ ID NO: 812 - DNA, 2175 bp, synthetic construct
  misc_feature 1..2175: note = source = /note="Description of Artificial Sequence: Synthetic polynucleotide"
  source 1..2175: mol_type = other DNA
atgtcttttgttgatcaccctccagattggttggaagaagttggtgaaggtcttcgcgagtttttgggccttgaagcgggcccaccgaaaccaaaacccaatcagcagcatcaagatcaagcccgtggtcttgtgctgcctggttataactatctcggacccggaaacggtctcgatcgaggagagcctgtcaacagggcagacgaggtcgcgcgagagcacgacatctcgtacaacgagcagcttgaggcgggagacaacccctacctcaagtacaaccacgcggacgccgagtttcaggagaagctcgccgacgacacatccttcgggggaaacctcggaaaggcagtctttcaggccaagaaaagggttctcgaaccttttggcctggttgaagagggtgctaagacggcccctaccggaaagcggatagacgaccactttccaaaaagaaagaaggcccggaccgaagaggactccaagccttccacctcgtcagacgccgaagctggacccagcggatcccagcagctgcaaatcccagcccaaccagcctcaagtttgggagctgatacaatgtctgcgggaggtggcggcccattgggcgacaataaccaaggtgccgatggagtgggcaatgcctcgggagattggcattgcgattccacgtggatgggggacagagtcgtcaccaagtccacccgaacctgggtgctgcccagctacaacaaccaccagtaccgagagatcaaaagcggctccgtcgacggaagcaacgccaacgcctactttggatacagcaccccctgggggtactttgactttaaccgcttccacagccactggagcccccgagactggcaaagactcatcaacaactactggggcttcagaccccggtccctcagagtcaaaatcttcaacattcaagtcaaagaggtcacggtgcaggactccaccaccaccatcgccaacaacctcacctccaccgtccaagtgtttacggacgacgactaccagctgccctacgtcgtcggcaacgggaccgagggatgcctgccggccttccctccgcaggtctttacgctgccgcagtacggttacgcgacgctgaaccgcgacaacacagaaaatcccaccgagaggagcagcttcttctgcctagagtactttcccagcaagatgctgagaacgggcaacaactttgagtttacctacaactttgaggaggtgcccttccactccagcttcgctcccagtcagaacctcttcaagctggccaacccgctggtggaccagtacttgtaccgcttcgtgagcacaaataacactggcggagtccagttcaacaagaacctggccgggagatacgccaacacctacaaaaactggttcccggggcccatgggccgaacccagggctggaacctgggctccggggtcaaccgcgccagtgtcagcgccttcgccacgaccaataggatggagctcgagggcgcgagttaccaggtgcccccgcagccgaacggcatgaccaacaacctccagggcagcaacacctatgccctggagaacactatgatcttcaacagccagccggcgaacccgggcaccaccgccacgtacctcgagggcaacatgctcatcaccagcgagagcgagacgcagccggtgaaccgcgtggcgtacaacgtcggcgggcagatggccaccaacaaccagagctccaccactgcccccgcgaccggcacgtacaacctccaggaaatcgtgcccggcagcgtgtggatggagagggacgtgtacctccaaggacccatctgagccaagatcccagagacgggggcgcactttcacccctctccggccatgggcggattcggactcaaacacccaccgcccatgatgctcatcaagaacacgcctgtgcccggaaatatcaccagcttctcggacgtgcccgtcagcagcttcatcacccagtacagcaccgggcaggtcaccgtggagatggagtgggagctcaagaaggaaaactccaagaggtggaacccagagatccagtacacaaacaactacaacgacccccagtttgtggactttgccccggacagcaccggggaatgcagaaccaccagacctatcggaacccgataccttacccgacccctttaa

SEQ ID NO: 813 - DNA, 2175 bp, synthetic construct
  misc_feature 1..2175: note = source = /note="Description of Artificial Sequence: Synthetic polynucleotide"
  source 1..2175: mol_type = other DNA
atgtcttttgttgatcaccctccagattggttggaagaagttggtgaaggtcttcgcgagtttttgggccttgaagcgggcccaccgaaaccaaaacccaatcagcagcatcaagatcaagcccgtggtcttgtgctgcctggttataactatctcggacccggaaacggtctcgatcgaggagagcctgtcaacagggcagacgaggtcgcgcgagagcacgacatctcgtacaacgagcagcttgaggcgggagacaacccctacctcaagtacaaccacgcggacgccgagtttcaggagaagctcgccgacgacacatccttcgggggaaacctcggaaaggcagtctttcaggccaagaaaagggttctcgaaccttttggcctggttgaagagggtgctaagacggcccctaccggaaagcggatagacgaccactttccaaaaagaaagaaggcccggaccgaagaggactccaagccttccacctcgtcagacgccgaagctggacccagcggatcccagcagctgcaaatcccagcccaaccagcctcaagtttgggagctgatacaatgtctgcgggaggtggcggcccattgggcgacaataaccaaggtgccgatggagtgggcaatgcctcgggagattggcattgcgattccacgtggatgggggacagagtcgtcaccaagtccacccgaacctgggtgctgcccagctacaacaaccaccagtaccgagagatcaaaagcggctccgtcgacggaagcaacgccaacgcctactttggatacagcaccccctgggggtactttgactttaaccgcttccacagccactggagcccccgagactggcaaagactcatcaacaactactggggcttcagaccccggtccctcagagtcaaaatcctcaacattcaagtcaaagaggtcacggtgcaggactccaccaccaccatcgccaacaacctcacctccaccgtccaagtgtttacggacgacgactaccagctgccctacgtcgtcggcaacgggaccgagggatgcctgccggccttccctccgcaggtctttacgctgccgcagtacggttacgcgacgctgaaccgcgacaacacagaaaatcccaccgagaggagcagcttcttctgcctagagtactttcccagcaagatgctgagaacgggcaacaactttgagtttacctacaactttgaggaggtgcccttccactccagcttcgctcccagtcagaacctcttcaagctggccaacccgctggtgggccagtacttgtaccgcttcgtgagcacaaataacactggcggagtccagttcaacgagaacctggccgggagatacgccaacacctacaaaaactggttcccggggcccatgggccgaacccagggctggaacctgggctccggggtcaaccgcgccagtgtcagcgccttcgccacgaccaataggatggagctcgagggcgcgagttaccaggtgcccccgcagccgaacggcatgaccaacaacctccagggcagcaacacctatgccctggagaacactatgatcttcaacagccagccggcgaacccgggcaccaccgccacgtacctcgagggcaacatgctcatcaccagcgagagcgagacgcagccggtgaaccgcgtggcgtacaacgtcggcgggcagatggccaccaacaaccagagctccaccactgcccccgcgaccggcacgtacaacctccaggaaatcgtgcccggcagcgtgtggatggagagggacgtgtacctccaaggacccatctgggccaagatcccagagacgggggcgcactttcacccctctccggccatgggcggattcggactcaaacacccaccgcccatgatgctcatcaagaacacgcctgtgcccggaaatatcaccagcttctcggacgtgcccgtcagcagcttcatcacccagtacagcaccgggcaggccaccgtggagatggagtgggagctcaagaaggaaaactccaagaggtggaacccagagatccagtacacaaacaactacaacgacccccagtttgtggactttgccccggacagcaccggggaatacagaaccaccagacctatcggaacccgataccttacccgacccctttaa

SEQ ID NO: 814 - DNA, 2175 bp, synthetic construct
  misc_feature 1..2175: note = source = /note="Description of Artificial Sequence: Synthetic polynucleotide"
  source 1..2175: mol_type = other DNA
atgtcttttgttgatcaccctccagattggttggaagaagttggtgaaggtcttcgcgagtttttgggccttgaagcgggcccaccgaaaccaaaacccaatcagcagcatcaagatcaagcccgtggtcttgtgctgcctggttataactatctcggacccggaaacggcctcgatcgaggagagcctgtcaacagggcagacgaggtcgcgcgagagcacgacatctcgtacaacgagcagcttgaggcgggagacaacccctacctcaagtacaaccacgcggacgccgagtttcaggagaagctcgccgacgacacatccttcgggggaaacctcggaaaggcagtctttcaggccaagaaaagggttctcgaaccttttggcctggttgaagagggtgctaagacggcccctaccggaaagcggatagacgaccactttccaaaaagaaagaaggcccggaccgaagaggactccaagccttccacctcgtcagacgccgaagctggacccagcggatcccagcagctgcaaatcccagcccaaccagcctcaagtttgggagctgatacaatgtctgcgggaggtggcggcccattgggcgacaataaccaaggtgccgatggagtgggcaatgcctcgggagattggcattgcgattccacgtggatgggggacagagtcgtcaccaagtccacccgaacctgggtgctgcccagctacaacaaccaccagtaccgagagatcaaaagcggctccgtcgacggaagcaacgccaacgcctactttggatacagcaccccctgggggtactttgactttaaccgcttccacagccactggagcccccgagactggcaaagactcatcaacaactactggggcttcagaccccggtccctcagagtcaaaatcttcaacattcaagtcaaagaggtcacggtgcaggactccaccaccatcatcgccaacaacctcacctccaccgtccaagtgtttacggacgacgactaccagctgccctacgtcgtcggcaacgggaccgagggatgcctgccggccttccctccgcaggtctttacgctgccgcagtacggttacgcgacgctgaaccgcgacaacacagaaaatcccaccgagaggagcagcttcttctgcctagagtactttcccagcaagatgctgagaacgggcaacaactttgagtttacctacaactttgaggaggtgcccttccactccagcttcgcccccagtcagaacctcttcaagctggccaacccgctggtggaccagtacttgtaccgcttcgtgagcacaaataacactggcggagtccagttcaacaagaacctggccgggagatacgccaacacctacaaaaactggttcccggggcccatgggccgaacccagggctggaacctgggctccggggtcaaccgcgccagtgtcagcgccttcgccacgaccaataggatggagctcgagggcgcgagttaccaggtgcccccgcagccgaacggcatgaccaacaacctccagggcagcaacacctatgccctggagaacactatgatcttcaacagccagccggcgaacccgggcaccaccgccacgtacctcgagggcaacatgctcatcaccagcgagagcgagacgcagccggtgaaccgcgtggcgtacaacgtcggcgggcagatggccaccaacaaccagagctccaccactgcccccgcgaccggcacgtacaacctccaggaaatcgtgcccggcagcgtgtggatggagagggacgtgtacctccaaggacccatctgggccaagatcccagagacgggggcgcactttcacccctctccggccatgggcggattcggactcaaacacccaccgcccatgatgctcatcaagaacacgcctgtgcccggaaatatcaccagcttctcggacgtgcccgtcagcagcttcatcacccagtacagcaccgggcaggtcaccgtggagatggagtgggagctcaagaaggaaaactccaagaggtggaacccagagatccagtacacaaacaactacaacgacccccagtttgtggactttgccccggacagcaccggggaatacagaaccaccagacctatcggaacccgataccttacccgacccctttaa

SEQ ID NO: 815 - DNA, 2175 bp, synthetic construct
  misc_feature 1..2175: note = source = /note="Description of Artificial Sequence: Synthetic polynucleotide"
  source 1..2175: mol_type = other DNA
atgtcttttgttgatcaccctccagattggttggaagaagttggtgaaggtcttcgcgagtttttgggccttgaagcgggcccaccgaaaccaaaacccaatcagcagcatcaagatcaagcccgtggtcttgtgctgcctggttataactatctcggacccggaaacggtctcgatcgaggagagcctgtcaacagggcagacgaggtcgcgcgagagcacgacatctcgtacaacgagcagcttgaggcgggagacaacccctacctcaagtacaaccacgcggacgccgagtttcaggagaagctcgccgacgacacatccttcgggggaaacctcggaaaggcagtctttcaggccaagaaaagggttctcgaaccttttggcctggttgaagagggtgctaagacggcccctaccggaaagcggatagacgaccactttccaaaaagaaagaaggcccggaccgaagaggactccaagccttccacctcgtcagacgccgaagctggacccagcggatcccagcagctgcaaatcccagcccaaccagcctcaagtttgggagctgatacaatgtctgcgggaggtggcggcccattgggcgacaataaccaaggtgccgatggagtgggcaatgcctcgggagattggcattgcgattccacgtggatgggggacagagtcgtcaccaagtccacccgaacctgggtgctgcccagctacaacaaccaccagtaccgagagatcaaaagcggctccgtcgacggaagcaacgccaacgcctactttggatacagcaccccctgggggtactttgactttaaccgcttccacagccactggagcccccgagactggcaaagactcatcaacaactactggggcttcagaccccggtccctcagagtcaaaatcttcaacattcaagtcaaagaggtcacggtgcaggactccaccaccaccatcgccaacaacctcacctccaccgtccaagtgtttacggacgacgactaccagctgccctacgtcgtcggcaacgggaccgagggatgcctgccggccttccctccgcaggtctttacgctgccgcagtacggttacgcgacgctgaaccgcgacaacacagaaaatcccaccgagaggagcagcttcttctgcctagagtactttcccagcaagatgctgagaacgggcaacaactttgagtttacctacaactttgaggaggtgcccttccactccagcttcgctcccagtcagaacctcttcaagctggccaacccgctggtggaccagtacttgtaccgcttcgtgagcacaaataacactggcggagtccagttcaacaagaacctggccgggagatacgccaacacctacaaaaactggttcccggggcccatgggccgaacccagggctggaacctgggctccggggtcaaccgcgccagtgtcagcgccttcgccacgaccaataggatggagctcgagggcgcgagttaccaggtgcccccgcagccgaacggcatgaccaacaacctccagggcagcaacacctatgccctggagaacactatgatcttcaacagccagccggcgaacccgggcaccaccgccacgtacctcgagggcaacatgctcatcaccagcgagagcgagacgcagccggtgaaccgcgtggcgtacaacgtcggcgggcagatggccaccaacaaccagagctccaccactgcccccgcgaccggcacgtacaacctccaggaaatcgtgcccggcagcgtgtggatggagagggacgtgtacctccaaggacccatctgggccaagatcccagagacgggggcgcactttcacccctctccggccatgggcggattcggactcaaacacccaccgcccatgatgctcatcaagaacacgcctgtgcccggaaatatcaccagcctctcggacgtgcccgtcagcagcttcatcacccagtacagcaccgggcaggtcaccgtggagatggagtgggagctcaagaaggaaaactccaagaggtggaacccagagatccagtacacaaacaactacaacgacccccagtttgtggactttgccccggacagcaccggggaatacagaaccaccagacctatcggaacccgataccttacccgacccctttaa

SEQ ID NO: 816 - DNA, 2175 bp, synthetic construct
  misc_feature 1..2175: note = source = /note="Description of Artificial Sequence: Synthetic polynucleotide"
  source 1..2175: mol_type = other DNA
atgtcttttgttgatcaccctccagattggttggaagaagttggtgaaggtcttcgcgagtttttgggccttgaagcgggcccaccgaaaccaaaacccaatcagcagcatcaagatcaagcccgtggtcttgtgctgcctggttataactatctcggacccggaaacggtctcgatcgaggagagcctgccaacagggcagacgaggtcgcgcgagagcacgacatctcgtacaacgagcagcttgaggcgggagacaacccctacctcaagtacaaccacgcgggcgccgagtttcaggagaagctcgccgacgacacatccttcgggggaaacctcggaaaggcagtctttcaggccaagaaaagggttctcgaaccttttggcctggttgaagagggtgctaagacggcccctaccggaaagcggatagacgaccactttccaaaaagaaagaaggcccggaccgaagaggactccaagccttccacctcgtcagacgccgaagctggacccagcggatcccagcagctgcaaatcccagcccaaccagcctcaagtttgggagctgatacaatgtctgcgggaggtggcggcccattgggcgacaataaccaaggtgccgatggagtgggcaatgcctcgggagattggcattgcgattccacgtggatgggggacagagtcgtcaccaagtccacccgaacctgggtgctgcccggctacaacaaccaccagtaccgagagatcaaaagcggctccgtcgacggaagcaacgccaacgcctactttggatacagcaccccctgggggtactttgactttaaccgcttccacagccactggagcccccgagactggcaaagactcatcaacaactactggggcttcagaccccggtccctcagagtcaaaatcttcaacattcaagtcaaagaggtcacggtgcaggactccaccaccaccatcgccaacaacctcacctccaccgtccaagtgtttacggacgacgactaccagctgccctacgtcgtcggcaacgggaccgagggatgcctgccggccttccctccgcaggtctttacgctgccgcagtacggttacgcgacgctgaaccgcgacaacacagaaaatcccaccgagaggagcagcttcttctgcctagagtactttcccagcaagatgctgagaacgggcaacaactttgagtttacctacaactttgaggaggtgcccttccactccagcttcgctcccagtcagaacctcttcaagctggccaacccgctggtggaccagtacttgtaccgcttcgtgagcacaaataatactggcggagtccagttcaacaagaacctggccgggagatacgccaacacctacaaaaactggttcccggggcccatgggccgaacccagggctggaacctgggctccggggtcaaccgcgccagtgtcagcgccttcgccacgaccaataggatggagctcgagggcgcgagttaccaggtgcccccgcagccgaacggcatgaccaacaacctccagggcagcaacacctatgccctggagaacactatgatcttcaacagccagccggcgaacccgggcaccaccgccacgtacctcgagggcaacatgctcatcaccagcgagagcgagacgcagccggtgaaccgcgtggcgtacaacgtcggcgggcagatggccaccaacaaccagagctccaccactgcccccgcgaccggcacgtacaacctccaggaaatcgtgcccggcagcgtgtggatggagagggacgtgtacctccaaggacccatctgggccaagatcccagagacgggggcgcactttcacccctctccggccatgggcggattcggactcaaacacccaccgcccatgatgctcatcaagaacacgcctgtgcccggaaatatcaccagcttctcggacgtgcccgtcagcagcttcatcacccagtacagcaccgggcaggtcaccgtggagatggagtgggagctcaagaaggaaaactccaagaggtggaacccagagatccagtacacaaacaactacaacgacccccagtttgtggactttgccccggacagcaccggggaatacagaaccaccagacctatcggaacccgataccttacccgacccctttaa

SEQ ID NO: 817 - DNA, 2175 bp, synthetic construct
  misc_feature 1..2175: note = source = /note="Description of Artificial Sequence: Synthetic polynucleotide"
  source 1..2175: mol_type = other DNA
atgtcttttgttgatcaccctccagattggttggaagaagttggtgaaggtcttcgcgagtttttgggccttgaagcgggcccaccgaaaccaaaacccaatcagcagcatcaagatcaagcccgtggtcttgtgctgcctggttataactatctcggacccggaaacggtctcgatcgaggagagcctgtcaacagggcagacgaggtcgcgcgagagcacgacatctcgtacaacgagcagcttgaggcgggagacaacccctacctcaagtacaaccacgcggacgccgagtttcaggagaagctcgccgacgacacatccttcgggggaaacctcggaaaggcagtctttcaggccaagaaaagggttctcgaaccttttggcctggttgaagagggtgctaagacggcccctaccggaaagcggatagacgaccactttccaaaaagaaagaaggcccggaccgaagaggactccaagcctcccacctcgtcagacgccgaagctggacccagcggatcccagcagctgcaaatcccagcccaaccagcctcaagtttgggagctgatacaatgtctgcgggaggtggcggcccattgggcgacaataaccaaggtgccgatggagtgggcaatgcctcgggagattggcattgcgattccacgtggatgggggacagagtcgtcaccaagtccacccgaacctgggtgctgcccagctacaacaaccaccagtaccgagagatcaaaagcggctccgtcgacggaagcaacgccaacgcctactttggatacagcaccccctgggggtactttgactttaaccgcttccacagccactggagcccccgagactggcaaagactcatcaacaactactggggcttcagaccccggtccctcagagtcaaaatcttcaacattcaagtcaaagaggtcacggtgcaggactccgccaccaccatcgccaacaacctcacctccaccgtccaagtgtttacggacgacgactaccagctgccctacgtcgtcggcaacgggaccgagggatgcctgccggccttccctccgcaggtctttacgctgccgcagtacggttacgcgacgctgaaccgcgacaacacagaaaatcccaccgagaggagcagcttcttctgcctagagtactttcccagcaagatgctgagaacgggcaacaactttgagtttacctacaactttgaggaggtgcccttccactccagcttcgctcccagtcagaacctcttcaagctggccaacccgctggtggaccagtacttgtaccgcttcgtgagcacaaataacactggcggagtccagttcaacaagaacctggccgggagatacgccaacacctacaaaaactggttcccggggcccatgggccgaacccagggctggaacctgggctccggggtcaaccgcgccagtgtcagcgccttcgccacgaccaataggatggagctcgagggcgcgagttaccaggtgcccccgcagccgaacggcatgaccaacaacctccagggcagcaacacctatgccctggagaacactatgatcttcaacagccagccggcgaacccgggcaccaccgccacgtacctcgagggcaacatgctcatcaccagcgagagcgagacgcagccggtgaaccgcgtggcgtacaacgtcggcgggcagatggccaccaacaaccagagctccaccactgcccccgcgaccggcacgtacaacctccaggaaatcgtgcccggcagcgtgtggatggagagggacgtgtacctccaaggacccatctgggccaagatcccagagacgggggcgcactttcacccctctccggccatgggcggattcggactcaaacacccaccgcccatgatgctcatcaagaacacgcctgtgcccggaaatatcaccagcttctcggacgtgcccgtcagcagcttcatcacccagtacagcaccgggcaggtcaccgtggagatggagtgggagctcaagaaggaaaactccaagaggtggaacccagagatccagtacacaaacaactacaacgacccccagtttgtggactttgccccggacagcaccggggaatacagaaccaccagacctatcggaacccgataccttacccgacccctttaa

SEQ ID NO: 818 - DNA, 2175 bp, synthetic construct
  misc_feature 1..2175: note = source = /note="Description of Artificial Sequence: Synthetic polynucleotide"
  source 1..2175: mol_type = other DNA
atgtcttttgttgatcaccctccagattggttggaagaagttggtgaaggtcttcgcgagtttttgggccttgaagcgggcccaccgaaaccaaaacccaatcagcagcatcaagatcaagcccgtggtcttgtgctgcctggttataactatctcggacccggaaacggtctcgatcgaggagagcctgtcaacagggcagacgaggtcgcgcgagagcacgacatctcgtacaacgagcagcttgaggcgggagacaacccctacctcaagtacaaccacgcggacgccgagtttcaggagaagctcgccgacgacacatccttcgggggaaacctcggaaaggcagtctttcaggccaagaaaagggttctcgaaccttttggcctggttgaagagggtgctaagacggcccctaccggaaagcggatagacgaccactttccaaaaagaaagaaggcccggaccgaagaggactccaagccttccacctcgtcagacgccgaagctggacccagcggatcccagcagccgcaaatcccagcccaaccagcctcaagtttgggagctgatacaatgtctgcgggaggtggcggcccattgggcgacaataaccaaggtgccgatggagtgggcaatgcctcgggagattggcattgcgattccacgtggatgggggacagagtcgtcaccaagtccacccgaacctgggtgctgcccagctacaacaaccaccagtaccgagagatcaaaagcggctccgtcgacggaagcaacgccaacgcctactttggatacagcaccccctgggggtactttgactttaaccgcttccacagccactggagcccccgagactggcaaagactcatcaacaactactggggcttcagaccccggtccctcagagtcaaaatcttcaacattcaagtcaaagaggtcacggtgcaggactccaccaccaccatcgccaacaacctcacctccaccgtccaagtgtttacggacgacgactaccagctgccctacgtcgtcggcaacgggaccgagggatgcctgccggccttccctccgcaggtctttacgctgccgcagtacggttacgcgacgctgaaccgcgacaacacagaaaatcccaccgagaggagcagcttcttctgcctagagtactttcccagcaagatgctgagaacgggcaacaactttgagtttacctacaactttgaggaggtgcccttccactccagcttcgctcccagtcagaacctcttcaagctggccaacccgctggtggaccagtacttgtaccgcttcgtgagcacaaataacactggcggagtccagttcaacaagaacctggccgggagatacgccaacacctacaaaaactggttcccggggcccatgggccgaacccagggctggaacctgggctccggggtcaaccgcgccagtgtcagcgccttcgccacgaccaataggatggagctcgagggcgcgagttaccaggtgcccccgcagccgaacggcatgaccaacaacctccagggcagcaacacctatgccctggagaacactatgatcttcaacagccagccggcgaacccgggcaccaccgccacgtacctcgagggcaacatgctcatcaccagcgagagcgagacgcagccggtgaaccgcgtggcgtacaacgtcggcgggcagatggccaccaacaaccagagctccaccactgcccccgcgaccggcacgtacaacctccaggaaatcgtgcccggcagcgtgtggatggagagggacgtgtacctccaaggacccatctgggccaagatcccagagacgggggcgcactttcacccctctccggccatgggcggattcggactcaaacacccaccgcccatgatgctcatcaagaacacgcctgcgcccggaaatatcaccagcttctcggacgtgcccgtcagcagcttcatcacccagtacagcaccgggcaggtcaccgtggagatggagtgggagctcaagaaggaaaactccaagaggtggaacccagagatccagtacacaaacaactacaacgacccccagtttgtggactttgccccggacagcaccggggaatacagaaccaccagacctatcggaacccgataccttacccgacccctttaa

SEQ ID NO: 819 - DNA, 2175 bp, synthetic construct
  misc_feature 1..2175: note = source = /note="Description of Artificial Sequence: Synthetic polynucleotide"
  source 1..2175: mol_type = other DNA
atgtcttttgttgatcaccctccagattggttggaagaagttggtgaaggtcttcgcgagtttttgggccttgaagcgggcccaccgaaaccaaaacccaatcagcagcatcaagatcaagcccgtggtcttgtgctgcctggttataactatctcggacccggaaacggtctcgatcgaggagagcctgtcaacagggcagacgaggtcgcgcgagagcacgacatctcgtacaacgagcagcttgaggcgggagacaacccctacctcaagtacaaccacgcggacgccgagtttcaggagaagctcgccgacgacacatccttcgggggaaacctcggaaaggcagtctttcaggccaagaaaagggttctcgaaccttttggcctggttgaagagggtgctaagacggcccctaccggaaagcggatagacgaccactttccaaaaagaaagaaggcccggaccgaagaggactccaagcctcccacctcgtcagacgccgaagctggacccagcggatcccagcagctgcaaatcccagcccaaccagcctcaagtttgggagctgatacaatgtctgcgggaggtggcggcccattgggcgacaataaccaaggtgccgatggagtgggcaatgcctcgggagattggcattgcgattccacgtggatgggggacagagtcgtcaccaagtccacccgaacctgggtgctgcccagctacaacaaccaccagtaccgagagatcaaaagcggctccgtcgacggaagcaacgccaacgcctactttggatacagcaccccctgggggtactttgactttaaccgcttccacagccactggagcccccgagactggcaaagactcatcaacaactactggggcttcagaccccggtccctcagagtcaaaatcttcaacattcaagtcaaagaggtcacggtgcaggactccaccaccaccatcgccaacaacctcacctccaccgtccaagtgtttacggacgacgactaccagctgccctacgtcgtcggcaacgggaccgagggatgcctgccggccttccctccgcaggtctttacgctgccgcagtacggttacgcgacgctgaaccgcgacaacacagaaaatcccaccgagaggagcagcttcttctgcctagagtactttcccagcaagatgctgagaacgggcaacaactttgagtttacctacaactttgaggaggtgcccttccactccagcttcgctcccagtcagaacctcttcaagctggccaacccgctggtggaccagtacttgtaccgcttcgtgagcacaaataacactggcggagtccagttcaacaagaacctggccgggagatacgccaacacctacaaaaactggttcccggggcccatgggccgaacccagggctggaacctgggctccggggtcaaccgcgccagtgtcagcgccttcgccacgaccaataggatggagctcgagggcgcgagttaccaggtgcccccgcagccgaacggcatgaccaacaacctccagggcagcaacacctatgccctggagaacactatgatcttcaacagccagccggcgaacccgggcaccaccgccacgtacctcgagggcaacatgctcatcaccagcgagagcgagacgcagccggtgaaccgcgtggcgtacaacgtcggcgggcagatggccaccaacaaccagagctccaccactgcccccgcgaccggcacgtacaacctccaggaaatcgtgcccggcagcgtgtggatggagagggacgtgtacctccaaggacccatctgggccaagatcccagagacgggggcgcactttcacccctctccggccatgggcggattcggactcaaacacccaccgcccatgatgctcatcaagaacacgcctgtgcccggaaatatcaccagcttctcggacgtgcccgtcagcagcttcatcacccagtacagcaccgggcaggtcaccgtggagatggagtgggagctcaagaaggaaaactccaagaggtggaacccagagatccagtacacaaacaactacaacgacccccagtttgtggactttgccccggacagcaccggggaatacagaaccaccagacctatcggaacccgataccttacccgacccctttaa

SEQ ID NO: 820 - DNA, 2175 bp, synthetic construct
  misc_feature 1..2175: note = source = /note="Description of Artificial Sequence: Synthetic polynucleotide"
  source 1..2175: mol_type = other DNA
atgtcttttgttgatcaccctccagattggttggaagaagttggtgaaggtcttcgcgagtttttgggccttgaagcgggcccaccgaaaccaaaacccaatcagcagcatcaagatcaagcccgtggtcttgtgctgcctggttataactatctcggacccggaaacggtctcgatcgaggagagcctgtcaacagggcagacgaggtcgcgcgagagcacgacatctcgtacaacgagcagcttgaggcgggagacaacccctacctcaagtacaaccacgcggacgccgagtttcaggagaagctcgccgacgacacatccttcgggggaaacctcggaaaggcagtctttcaggccaagaaaagggttctcgaaccttttggcctggttgaagagggtgctaagacggcccctaccggaaagcggatagacgaccactttccaaaaagaaagaaggcccggaccgaagaggactccaagcctcccacctcgtcagacgccgaagctggacccagcggatcccagcagctgcaaatcccagcccaaccagcctcaagtttgggagctgatacaatgtctgcgggaggtggcggcccattgggcgacaataaccaaggtgccgatggagtgggcaatgcctcgggagattggcattgcgattccacgtggatgggggacagagtcgtcaccaagtccacccgaacctgggtgccgcccagctacaacaaccaccagtaccgagagatcaaaagcggctccgtcgacggaagcaacgccaacgcctactttggatacagcaccccctgggggtactttgactttaaccgcttccacagccactggagcccccgagactggcaaagactcatcaacaactactggggcttcagaccccggtccctcagagtcaaaatcttcaacattcaagtcaaagaggtcacggtgcaggactccaccaccaccatcgccaacaacctcacctccaccgtccaagtgtttacggacgacgactaccagctgccctacgtcgtcggcaacgggaccgagggatgcctgccggccttccctccgcaggtctttacgctgccgcagtacggttacgcgacgctgaaccgcgacaacacagaaaatcccaccgagaggagcagcttcttctgcctagagtactttcccagcaagatgctgagaacgggcaacaactttgagtttacctacaactttgaggaggtgcccttccactccagcttcgctcccagtcagaacctcttcaagctggccaacccgctggtggaccagtacttgtaccgcttcgtgagcacaaataacactggcggagtccagttcaacaagaacctggccgggagatacgccaacacctacaaaaactggttcccggggcccatgggccgaacccagggctggaacctgggctccggggtcaaccgcgccagtgtcagcgccttcgccacgaccaataggatggagctcgagggcgcgagttaccaggtgcccccgcagccgaacggcatgaccaacaacctccagggcagcaacacctatgccctggagaacactatgatcttcaacagccagccggcgaacccgggcaccaccgccacgtacctcgagggcaacatgctcatcaccagcgagagcgagacgcagccggtgaaccgcgtggcgtacaacgtcggcgggcagatggccaccaacaaccagagctccaccactgcccccgcgaccggcacgtacaacctccaggaaatcgtgcccggcagcgtgtggatggagagggacgtgtacctccaaggacccatctgggccaagatcccagagacgggggcgcactttcacccctctccggccatgggcggattcggactcaaacacccaccgcccatgatgctcatcaagaacacgcctgtgcccggaaatatcaccagcttctcggacgtgcccgtcagcagcttcatcacccagtacagcaccgggcaggtcgccgtggagatggagtgggagctcaagaaggaaaactccaagaggtggaacccagagatccagtacacaaacaactacaacgacccccagtttgtggactttgccccggacagcaccggggaatacagaaccaccagacctatcggaacccgataccttacccgacccctttaa

SEQ ID NO: 821 - DNA, 2175 bp, synthetic construct
  misc_feature 1..2175: note = source = /note="Description of Artificial Sequence: Synthetic polynucleotide"
  source 1..2175: mol_type = other DNA
atgtcttttgttgatcaccctccagattggttggaagaagttggtgaaggtcttcgcgagtttttgggccttgaagcgggcccaccgaaaccaaaacccaatcagcagcatcaagatcaagcccgtggtcttgtgctgcctggttataactatctcggacccggaaacggtctcgatcgaggagagcctgtcaacagggcagacgaggtcgcgcgagagcacgacatctcgtacaacgagcagcttgaggcgggagacaacccctacctcaagtacaaccacgcggacgccgagtttcaggagaagctcgccgacgacacatccttcgggggaaacctcggaaaggcagtctttcaggccaagaaaagggttctcgaaccttttggcctggttgaagagggtgctaagacggcccctaccggaaagcggatagacgaccactttccaaaaagaaagaaggcccggaccgaagaggactccaagccttccacctcgtcagacgccgaagctggacccagcggatcccagcagctgcaaatcccagcccaaccagcctcaagtttgggagctgatacaatgtctgcgggaggtggcggcccattgggcgacaataaccaaggtgccgatggagtgggcaatgcctcgggagattggcattgcgattccacgtggatgggggacagagtcgtcaccaagtccacccgaacctgggtgctgcccagctacaacaaccaccagtaccgagagatcaaaagcggctccgtcgacggaagcaacgccaacgcctactttggatacagcaccccctgggggtactttgactttaaccgcttccacagccactggagcccccgagactggcaaagactcatcaacaactactggggcttcagaccccggtccctcagagtcaaaatcttcaacattcaagtcaaagaggtcacggtgcaggactccaccaccaccatcgccaacaacctcacctccaccgtccaagtgtttacggacgacgactaccagctgccctacgtcgtcggcaacgggaccgagggatgcctgccggccttccctccgcaggtctttacgctgccgcagtacggttacgcgacgctgaaccgcgacaacacagaaaatcccaccgagaggagcagcttcttctgcctagagtactttcccagcaagatgctgagaacgggcaacaactttgagtttacctacaactttgaggaggtgcccttccactccagcttcgctcccagtcagaacctcttcaagctggccaacccgctggtggaccagtacttgtaccgcttcgtgagcacaaataacactggcggagtccagttcaacaagaacctggccgggagatacgccaacacctacaaaaactggttcccggggcccatgggccgaacccagggctggaacctgggctccggggtcaaccgcgccagtgtcagcgccttcgccacgaccaataggatggagctcgagggcgcgagttaccaggtgcccccgcagccgaacggcatgaccaacaacctccagggcagcaacacctatgccctggagaacactatgatcttcaacagccagccggcgaacccgggcaccaccgccacgtacctcgagggcaacatgctcatcaccagcgagagcgagacgcagccggtgaaccgcgtggcgtacaacgtcggcgggcagatggccaccaacaaccagagctccaccactgcccccgcgaccggcacgtacaacctccaggaaatcgtgcccggcagcgtgtggatggagagggacgtgtacctccaaggacccatctgggccaagatcccagagacgggggcgcactttcacccctctccggccatgggcggattcggactcaaacacccaccgcccatgatgctcatcaagaacacgcctgcgcccggaaatatcaccagcttctcggacgtgcccgtcagcagcttcatcacccagtacagcaccgggcaggtcaccgtggagatggagtgggagctcaagaaggaaaactccaagaggtggaacccagagatccagtacacaaacaactacaacgacccccagtttgtggactttgccccggacagcaccggggaatacagaaccaccagacctatcggaacccgataccttacccgacccctttaa

SEQ ID NO: 822 - DNA, 2175 bp, synthetic construct
  misc_feature 1..2175: note = source = /note="Description of Artificial Sequence: Synthetic polynucleotide"
  source 1..2175: mol_type = other DNA
atgtcttttgttgatcaccctccagattggttggaagaagttggtgaaggtcttcgcgagtttttgggccttgaagcgggcccaccgaaaccaaaacccaatcagcagcatcaagatcaagcccgtggtcttgtgctgcctggttataactatctcggacccggaaacggtctcgatcgaggagagcctgtcaacagggcagacgaggtcgcgcgagagcacgacatctcgtacaacgagcagcttgaggcgggagacaacccctacctcaagtacaaccacgcggacgccgagtttcaggagaagctcgccgacgacacatccttcgggggaaacctcggaaaggcagtctttcaggccaagaaaagggttctcgaaccttttggcctggctgaagagggtgctaagacggcccctaccggaaagcggatagacgaccactttccaaaaagaaagaaggcccggaccgaagaggactccaagccttccacctcgtcagacgccgaagctggacccagcggatcccagcagctgcaaatcccagcccaaccagcctcaagtttgggagctgatacaatgtctgcgggaggtggcggcccattgggcgacaataaccaaggtgccgatggagtgggcaatgcctcgggagattggcattgcgattccacgtggatgggggacagagtcgtcaccaagtccacccgaacctgggtgctgcccagctacaacaaccaccagtaccgagagatcaaaagcggctccgtcgacggaagcaacgccaacgcctactttggatacagcaccccctgggggtactttgactttaaccgcttccacagccactggagcccccgagactggcaaagactcatcaacaactactggggcttcagaccccggtccctcagagccaaaatcttcaacattcaagtcaaagaggtcacggtgcaggactccaccaccaccatcgccaacaacctcacctccaccgtccaagtgtttacggacgacgactaccagctgccctacgtcgtcggcaacgggaccgagggatgcctgccggccttccctccgcaggtctttacgctgccgcagtacggttacgcgacgctgaaccgcgacaacacagaaaatcccaccgagaggagcagcttcttctgcctagagtactttcccagcaagatgctgagaacgggcaacaaccttgagtttacctacaactttgaggaggtgcccttccactccagcttcgctcccagtcagaacctcttcaagctggccaacccgctggtggaccagtacttgtaccgcttcgtgagcacaaataacactggcggagtccagttcaacaagaacctggccgggagatacgccaacacctacaaaaactggttcccggggcccatgggccgaacccagggctggaacctgggctccggggtcaaccgcgccagtgtcagcgccttcgccacgaccaataggatggagctcgagggcgcgagttaccaggtgcccccgcagccgaacggcatgaccaacaacctccagggcagcaacacctatgccctggagaacactatgatcttcaacagccagccggcgaacccgggcaccaccgccacgtacctcgagggcaacatgctcatcaccagcgagagcgagacgcagccggtgaaccgcgtggtgcacaacgtcggcgggcagatggccaccaacaaccagagctccaccactgcccccgcgaccggcacgtacaacctccaggaaatcgtgcccggcagcgtgtggatggagagggacgtgtacctccaaggacccatctgggccaagatcccagagacgggggcgcactttcacccctctccggccatgggcggattcggactcaaacacccaccgcccatgatgctcatcaagaacacgcctgtgcccggaaatatcaccagcttctcggacgtgcccgtcagcagcttcatcacccagtacagcaccgggcaggtcaccgtggagatggagtgggagctcaagaaggaaaactccaagaggtggaacccggagatccagtacacaaacaactacaacgacccccagtttgtggactttgccccggacagcaccggggaatacagaaccaccagacctatcggaacccgataccttacccgacccctttaa

SEQ ID NO: 823 - DNA, 2175 bp, synthetic construct
  misc_feature 1..2175: note = source = /note="Description of Artificial Sequence: Synthetic polynucleotide"
  source 1..2175: mol_type = other DNA
atgtcttttgttgatcaccctccagattggttggaagaagttggtgaaggtcttcgcgagtttttgggccttgaagcgggcccaccgaaaccaaaacccaatcagcagcatcaagatcaagcccgtggtcttgtgctgcctggttataactatctcggacccggaaacggtctcgatcgaggagagcctgtcaacagggcagacgaggtcgcgcgagagcacgacatctcgtacaacgagcagcttgaggcgggagacaacccctacctcaagtacaaccacgcggacgccgagtttcaggagaagctcgccgacgacacatccttcgggggaaacctcggaaaggcagtctttcaggccaagaaaagggttctcgaaccttttggcctggttgaagagggtgctaagacggcccctaccggaaagcggatagacgaccactttccaaaaagaaagaaggcccggaccgaagaggactccaagccttccacctcgtcagacgccgaagctggacccagcggatcccagcagctgcaaatcccagcccaaccagcctcaagtttgggagctgatacaatgtctgcgggaggtggcggcccattgggcgacaataaccaaggtgccgatggagtgggcaatgcctcgggagattggcattgcgattccacgtggatgggggacagagtcgtcaccaagtccacccgaacctgggtgctgcccagctacaacaaccaccagtaccgagagatcaaaagcggctccgtcgacggaggcaacgccaacgcctactttggatacagcaccccctgggggtactttgactttaaccgcttccacagccactggagcccccgggactggcaaagactcatcaacaactactggggcttcagaccccggtccctcagagtcaaaatcttcaacattcaagtcaaagaggtcacggtgcaggactccaccaccaccatcgccaacaacctcacctccaccgtccaagtgtttacggacgacgactaccagctgccctacgtcgtcggcaacgggaccgagggatgcctgccggccttccctccgcaggtctttacgctgccgcagtacggttacgcgacgctgaaccgcgacaacacagaaaatcccaccgagaggagcagcttcttctgcctagagtactttcccagcaagatgctgagaacgggcaacaactttgagtttacctacaactttgaggaggtgcccttccactccagcttcgctcccagtcagaacctcttcaagctggccaacccgctggtggaccagtacttgtaccgcttcgtgagcacaaataacactggcggagtccagttcaacaagaacctggccgggagatacgccaacacctacaaaaactggttcccggggcccatgggccgaacccagggctggaacctgggctccggggtcaaccgcgccagtgtcagcgccttcgccacgaccaataggatggagctcgagggcgcgagttaccaggtgcccccgcagccgaacggcatgaccaacaacctccagggcagcaacacctatgccctggagaacactatgatcttcaacagccagccggcgaacccgggcaccaccgccacgtacctcgagggcaacatgctcatcaccagcgagagcgagacgcagccggtgaaccgcgtggcgtacaacgtcggcgggcagatggccaccaacaaccagagctccaccactgcccccgcgaccggcacgtacaacctccaggaaatcgtgcccggcagcgtgtggatggagagggacgtgtacctccaaggacccatctgggccaagatcccagagacgggggcgcactttcacccctctccggccatgggcggattcggactcaaacacccaccgcccatgatgctcatcaagaacacgcctgcgcccggaaatatcaccagcttctcggacgtgcccgtcagcagcttcatcacccagtacagcaccgggcaggtcaccgtggagatggagtgggagctcaagaagggaaactccaagaggtggaacccagagatccagtacacaaacaactacaacgacccccagtttgtggactttgccccggacagcaccggggaatacagaaccaccagacctatcggaacccgataccttacccgacccctttaa

SEQ ID NO: 824 - DNA, 2175 bp, synthetic construct
  misc_feature 1..2175: note = source = /note="Description of Artificial Sequence: Synthetic polynucleotide"
  source 1..2175: mol_type = other DNA
atgtcttttgttgatcaccctccagattggttggaagaagttggtgaaggtcttcgcgagtttttgggccttgaagcgggcccaccgaaaccaaaacccaatcagcagcatcaagatcaagcccgtggtcttgtgctgcctggttataactatctcggacccggaaacggtctcgatcgaggagagcctgtcaacagggcagacgaggtcgcgcgagagcacgacatctcgtacaacgagcagcttgaggcgggagacaacccctacctcaagtacaaccacgcggacgccgagtttcaggagaagctcgccgacgacacgtccttcgggggaaacctcggaaaggcagtctttcaggccaagaaaagggttctcgaaccttttggcctggttgaagagggtgctaagacggcccctaccggaaagcggatagacgaccactttccaaaaagaaagaaggcccggaccgaagaggactccaagccttccacctcgtcagacgccgaagctggacccagcggatcccagcagctgcaaatcccagcccaaccagcctcaagtttgggagctgatacaatgtctgcgggaggtggcggcccattgggcgacaataaccaaggtgccgatggagtgggcaatgcctcgggagattggcattgcgattccacgtggatgggggacagagtcgtcaccaagtccacccgaacctgggtgctgcccagctacaacaaccaccagtaccgagagatcaaaagcggctccgtcgacggaagcaacgccaacgcctactttggatacagcaccccctgggggtactttgactttaaccgcttccacagccactggagcccccgagactggcaaagactcatcaacaactactggggcttcagaccccggtccctcagagtcaaaatcttcaacattcaagtcaaagaggtcacggtgcaggactccaccaccaccatcgccaacaacctcacctccaccgtccaagtgtttacggacgacgactaccagctgccctacgtcgtcggcaacgggaccgagggatgcctgccggccttccctccgcaggtctttacgctgccgcagtacggttacgcgacgctgaaccgcgacaacacagaaaatcccaccgagaggagcagcttcttctgcctagagtactttcccagcaagatgctgagaacgggcaacaactttgagtttacctacaactttgaggaggtgcccttccactccagcttcgctcccagtcagaacctcttcaagctggccaacccgctggtggaccagtacttgtaccgcttcgtgagcacaaataacactggcggagtccagttcaacaagaacctggccgggagatacgccaacacctacaaaaactggttcccggggcccatgggccgaacccagggctggaacctgggctccggggtcaaccgcgccagtgtcagcgccttcgccacgaccaataggatggagctcgagggcgcgagttaccaggtgcccccgcagccgaacggcatgaccaacaacctccagggcagcaacacctatgccctggagaacactatgatcttcaacagccagccggcgaacccgggcaccaccgccacgtacctcgagggcaacatgctcatcaccagcgagagcgagacgcagccggtgaaccgcgtggcgtacaacgtcggcgggcagatggccaccaacaaccagagctccaccactgcccccgcgaccggcacgtacaacctccaggaaatcgtgcccggcagcgtgtggatggagagggacgtgtacctccaaggacccatctgggccaagatcccagagacgggggtgcactttcacccctctccggccatgggcggattcggactcaaacacccaccgcccatgatgctcatcaagaacacgcctgtgcccggaaatatcaccagcttctcggacgtgcccgtcagcagcttcatcacccagtacagcaccgggcaggtcaccgtggagatggagtgggagctcaagaaggaaaactccaagaggtggaacccagagatccagtacacaaacaactacaacgacccccagtttgtggactttgccccggacagcaccggggaatacagaaccaccagacctatcggaacccgataccttacccgacccctttaa

SEQ ID NO: 825 - DNA, 2175 bp, synthetic construct
  misc_difference 1652: note = modified_base - a, c, t, or g
  misc_feature 1..2175: note = source = /note="Description of Artificial Sequence: Synthetic polynucleotide"
  source 1..2175: mol_type = other DNA
atgtcttttgttgatcaccctccagattggttggaagaagttggtgaaggtcttcgcgagtttttgggccttgaagcgggcccaccgaaaccaaaacccaatcagcagcatcaagatcaagcccgtggtcttgtgctgcctggttataactatctcggacccggaaacggtctcgatcgaggagagcctgtcaacagggcagacgaggtcgcgcgagagcacgacatctcgtacaacgagcagcttgaggcgggagacaacccctacctcaagtacaaccacgcggacgccgagtttcaggagaagctcgccgacgacacatccttcgggggaaacctcggaaaggcagtctttcaggccaagaaaagggttctcgaaccttttggcctggttgaagagggtgctaagacggcccctaccggaaagcggatagacgaccactttccaaaaagaaagaaggcccggaccgaggaggactccaagccttccacctcgtcagacgccgaagctggacccagcggatcccagcagctgcaaatcccagcccaaccagcctcaagtttgggagctgatacaatgtctgcgggaggtggcggcccattgggcgacaataaccaaggtgccgatggagtgggcaatgcctcgggagattggcattgcgattccacgtggatgggggacagagtcgtcaccaagtccacccgaacctgggtgctgcccagctacaacaaccaccagtaccgagagatcaaaagcggctccgtcgacggaagcaacgccaacgcctactttggatacagcaccccctgggggtactttgactttaaccgcttccacagccactggagcccccgagactggcaaagactcatcaacaactactggggcttcagaccccggtccctcagagtcaaaatcttcaacattcaagtcaaagaggtcacggtgcaggactccaccaccaccatcgccaacaacctcacctccaccgtccaagtgtttacggacgacgactaccagctgccctacgtcgtcggcaacgggaccgagggatgcctgccggccttccctccgcaggtctttacgctgccgcagtacggttacgcgacgctgaaccgcgacaacacagaaaatcccaccgagaggagcagcttcttctgcctagagtactttcccagcaagatgctgagaacgggcaacaactttgagtttacctacaactttgaggaggtgcccttccactccagcttcgctcccagtcagaacctcttcaagctggccaacccgctggtggaccagtacttgtaccgcttcgtgagcacaaataacactggcggagtccagttcaacaagaacctggccgggagatacgccaacacctacaaaaactggttcccggggcccatgggccgaacccagggctggaacctgggctccggggtcaaccgcgccagtgtcagcgccttcgccacgaccaataggatggagctcgagggcgcgagttaccaggtgcccccgcagccgaacggcatgaccaacaacctccagggcagcaacacctatgccctggagaacactatgatcttcaacagccagccggcgaacccgggcaccaccgccacgtacctcgagggcagcatgctcatcaccancgagagcgagacgcagccggtgaaccgcgtggcgtacaacgtcggcgggcagatggccaccaacaaccagagctccaccactgcccccgcgaccggcacgtacaacctccaggaaatcgtgcccggcagcgtgtggatggagagggacgtgtacctccaaggacccatctgggccaagatcccagagacgggggcgcactttcacccctctccggccatgggcggattcggactcaaacacccaccgcccatgatgctcatcaagaacacgcctgtgcccggaaatatcaccagcttctcggacgtgcccgtcagcagcttcatcacccagtacagcaccgggcaggtcaccgtggagatggagtgggagctcaagaaggaaaactccaagaggtggaacccagagatccagtacacaaacaactacaacgacccccagtttgtggactttgccccggacagcaccggggaatacagaaccaccagacctatcggaacccgataccttacccgacccctttaa

SEQ ID NO: 826 - DNA, 2211 bp, synthetic construct
  misc_feature 1..2211: note = source = /note="Description of Artificial Sequence: Synthetic polynucleotide"
  source 1..2211: mol_type = other DNA
atggctgctgacggttatcttccagattggctcgaggacaacctttctgaaggcattcgtgagtggtgggctctgaaacctggagtccctcaacccaaagcgaaccaacaacaccaggacaaccgtcggggtcttgtgcttccgggttacaaatacctcggacccggtaacggactcgacaaaggagagccggtcaacgaggcggacgcggcagccctcgaacacgacaaagcttacgaccagcagctcaaggccggtgacaacccgtacctcaagtacaaccacgccgacgccgagtttcaggagcgtcttcaagaagatacgtcttttgggggcaaccttggcagagcagtcttccaggccaaaaagaggatccttgagcctcttggtctggttgaggaagcagctaaaacggctcctggaaagaagaggcctgtagatcagtctcctcaggaaccggactcatcatctggtgttggcaaatcgggcaaacagcctgccagaaaaagactaaatttcggtcagactggcgactcagagtcagtcccagaccctcaacctctcggagaaccaccagcagcccccacaagtttgggatctaatacaatggcttcaggcggtggcgcaccaatggcagacaataacgagggtgccgatggagtgggtaattcctcaggaaattggcattgcgattcccaatggctgggcgacagagtcatcaccaccagcaccagaacctgggccctgcccacttacaacaaccatctctacaagcaaatctccagccaatcaggagcttcaaacgacaaccactactttggctacagcaccccttgggggtattttgactttaacagattccactgccacttctcaccacgtgactggcagcgactcattaacaacaactggggattccggcccaagaaactcagcttcaagctcttcaacatccaagttaaagaggtcacgcagaacgatggcacgacgactattgccaataaccttaccagcacggttcaagtgtttacggactcggagtatcagctcccgtacgtgctcgggtcggcgcaccaaggctgtctcccgccgtttccagcggacgtcttcatggtccctcagtatggatacctcaccctgaacaacggaagtcaagcggtgggacgctcatccttttactgcctggagtacttcccttcgcagatgctaaggactggaaataacttccaattcagctataccttcgaggatgtaccttttcacagcagctacgctcacagccagagtttggatcgcttgatgaatcctcttattgatcagtatctgtactacctgaacagaacgcaaggaacaacctctggaacaaccaaccaatcacggctgctttttagccaggctgggcctcagtctatgtctttgcaggccagaaattggctacctgggccctgctaccggcaacagagactttcaaagactgctaacgacaacaacaacagtaactttccttggacagcggccagcaaatatcatctcaatggccgcgactcgctggtgaatccaggaccagctatggccagtcacaaggacgatgaagaaaaatttttccctatgcacggcaatctaatatttggcaaagaagggacaacggcaagtaacgcagaattagataatgtaatgattacggatgaagaagagattcgtaccaccaatcctgtggcaacagagcagtatggaactgtggcaaataacttgcagagctcaaatacagctcccacgactagaactgtcaatgatcagggggccttacctggcatggtgtggcaagatcgtgacgtgtaccttcaaggacctatctgggcaaagattcctcacacggatggacactttcatccttctcctctgatgggaggctttggactgaaacatccgcctcctcaaatcatgatcaaaaatactccggtaccggcaaatcctccgacgactttcagcccggccaagtttgcttcatttatcactcagtactccactggacaggtcagcgtggaaattgagtgggagctacagaaagaaaacagcaaacgttggaatccagagattcagtacacttccaactacaacaagtctgttaatgtggactttactgtagacactaatggtgtttatagtgaacctcgccctattggaacccggtatctcacacgaaacttgtaa

SEQ ID NO: 827 - DNA, 2205 bp, synthetic construct; identical to SEQ ID NO: 95
  misc_feature 1..2205: note = source = /note="Description of Artificial Sequence: Synthetic polynucleotide"
  source 1..2205: mol_type = other DNA

SEQ ID NO: 828 - DNA, 2234 bp, synthetic construct
  misc_feature 1..2234: note = source = /note="Description of Artificial Sequence: Synthetic polynucleotide"
  source 1..2234: mol_type = other DNA
atgtcttttgttgatcaccctccagattggttggaagaagttggtgaaggtcttcgcgagtttttgggccttgaagcgggcccaccgaaaccaaaacccaatcagcagcatcaagatcaagcccgtggtcttgtgctgcctggttataactatctcggacccggaaacggtctcgatcgaggagagcctgtcaacagggcagacgaggtcgcgcgagagcacgacatctcgtacaacgagcagcttgaggcgggagacaacccctacctcaagtacaaccacgcggacgccgagtttcaggagaagctcgccgacgacacatccttcgggggaaacctcggaaaggcagtctttcaggccaagaaaagggttctcgaaccttttggcctggttgaagagggtgctaagacggcccctaccggaaagcggatagacgaccactttccaaaaagaaagaaggctcggaccgaagaggactccaagccttccacctcgtcagacgccgaagctggacccagcggatcccagcagctgcaaatcccagcccaaccagcctcaagtttgggagctgatacaatgtctgcgggaggtggcggcccattgggcgacaataaccaaggtgccgatggagtgggcaatgcctcgggagattggcattgcgattccacgtggatgggggacagagtcgtcaccaagtccacccgaacctgggtgctgcccagctacaacaaccaccagtaccgagagatcaaaagcggctccgtcgacggaagcaacgccaacgcctactttggatacagcaccccctgggggtactttgactttaaccgcttccacagccactggagcccccgagactggcaaagactcatcaacaactactggggcttcagaccccggtccctcagagtcaaaatcttcaacattcaagtcaaagaggtcacggtgcaggactccaccaccaccatcgccaacaacctcacctccaccgtccaagtgtttacggacgacgactaccagctgccctacgtcgtcggcaacgggaccgagggatgcctgccggccttccctccgcaggtctttacgctgccgcagtacggttacgcgacgctgaaccgcgacaacacagaaaatcccaccgagaggagcagcttcttctgcctagagtactttcccagcaagatgctgagaacgggcaacaactttgagtttacctacaactttgaggaggtgcccttccactccagcttcgctcccagtcagaacctgttcaagctggccaacccgctggtggaccagtacttgtaccgcttcgtgagcacaaataacactggcggagtccagttcaacaagaacctggccgggagatacgccaacacctacaaaaactggttcccggggcccatgggccgaacccagggctggaacctgggctccggggtcaaccgcgccagtgtcagcgccttcgccacgaccaataggatggagctcgagggcgcgagttaccaggtgcccccgcagccgaacggcatgaccaacaacctccagggcagcaacacctatgccctggagaacactatgatcttcaacagccagccggcgaacccgggcaccaccgccacgtacctcgagggcaacatgctcatcaccagcgagagcgagacgcagccggtgaaccgcgtggcgtacaacgtcggcgggcagatggccaccaacaaccagagctccaccactgcccccgcgaccggcacgtacaacctccaggaaatcgtgcccggcagcgtgtggatggagagggacgtgtacctccaaggacccatctgggccaagatcccagagacgggggcgcactttcacccctctccggccatgggcggattcggactcaaacacccaccgcccatgatgctcatcaagaacacgcctgtgcccggaaatatcaccagcttctcggacgtgcccgtcagcagcttcatcacccagtacagcaccgggcaggtcaccgtggagatggagtgggagctcaagaaggaaaactccaagaggtggaacccagagatccagtacacaaacaactacaacgacccccagtttgtggactttgccccggacagcaccggggaatacagaaccaccagacctatcggaacccgataccttacccgacccctttaacccattcatgtcgcataccctcaataaaccgtgtattcgtgtcagtaaaatactgcctc

SEQ ID NO: 829 - protein, 736 aa, synthetic construct
  REGION 1..736: note = source = /note="Description of Artificial Sequence: Synthetic polypeptide"
MAADGYLPDWLEDNLSEGIREWWALKPGVPQPKANQQHQDNRRGLVLPGYKYLGPGNGLDKGEPVNEADAAALEHDKAYDQQLKAGDNPYLKYNHADAEFQERLQEDTSFGGNLGRAVFQAKKRILEPLGLVEEAAKTAPGKKRPVDQSPQEPDSSSGVGKSGKQPARKRLNFGQTGDSESVPDPQPLGEPPAAPTSLGSNTMASGGGAPMADNNEGADGVGNSSGNWHCDSQWLGDRVITTSTRTWALPTYNNHLYKQISSQSGASNDNHYFGYSTPWGYFDFNRFHCHFSPRDWQRLINNNWGFRPKKLSFKLFNIQVKEVTQNDGTTTIANNLTSTVQVFTDSEYQLPYVLGSAHQGCLPPFPADVFMVPQYGYLTLNNGSQAVGRSSFYCPEYFPSQMLRTGNNFQFSYTFEDVPFHSSYAHSQSLDRLMNPLIDQYLYYLNRTQGTTSGTTNQSRLLFSQAGPQSMSLQARNWLPGPCYRQQRLSKTANDNNNSNFPWTAASKYHLNGRDSLVNPGPAMASHKDDEEKFFPMHGNLIFGKEGTTASNAELDNVMITDEEEIRTTNPVATEQYGTVANNLQSSNTAPTTRTVNDQGALPGMVWQDRDVYLQGPIWAKIPHTDGHFHPSPLMGGFGLKHPPPQIMIKNTPVPANPPTTFSPAKFASFITQYSTGQVSVEIEWELQKENSKRWNPEIQYTSNYNKSVNVDFTVDTNGVYSEPHPIGTRYLTRNL

SEQ ID NO: 830 - protein, 736 aa, synthetic construct
  REGION 1..736: note = source = /note="Description of Artificial Sequence: Synthetic polypeptide"
MAADGYLPDWLEDNLSEGIREWWALKPGVPQPKANQQHQDNRRGLVLPGYKYLGPGNGLDKGEPVNEADAAALEHDKAYDQQLKAGDNPYLKYNHADAEFQERLQEDTSFGGNLGRAVFQAKKRILEPLGLVEEAAKTAPGKKRPVDQSPQEPDSSSGVGKSGKQPARKRLNFGQTGDSESVPDPQPLGEPPAAPTSLGSNTMASGGGAPMADNNEGADGVGNSSGNWHCDSQWLGDRVITTSTRTWALPTYNNHLYKQISSQSGASNDNHYFGYSTPWGYFDFNRFHCHFSPRDWQRLINNNWGFRPKKLSFKLFNIQVKEVTQNDGTTTVANNLTSTVQVFTDSEYQLPYVLGSAHQGCLPPFPADVFMVPQYGYLTLNNGSQAVGRSSFYCLEYFPSQMLRTGNNFQFSYTFEDVPFHSSYAHSQSLDRLMNPLIDQYLYYLNRTQGTTSGTTNQSRLLFSQAGPQSMSLQARNWLPGPCYRQQRLSKTANDNNNSNFPWTAASKYHLNGRDSLVNPGPAMASHKDDEEKFFPMHGNLIFGKEGTTASNAELDNVMITDEEEIRTTNPVATEQYGTVANNLQSSNTAPTTRTVNDQGALPGMVWQDRDVYLQGPIWAKIPHTDGHFHPSPLMGGFGLKHPPPQIMIKNTPVPANPPTTFSPAKFASFITQYSTGQVSVEIEWELQKENSKRWNPEIQYTSNYNKSVNVDFTVDTNGVYSEPRPIGTRYLTRNL

SEQ ID NO: 831 - protein, 736 aa, synthetic construct
  REGION 1..736: note = source = /note="Description of Artificial Sequence: Synthetic polypeptide"
MAADGYLPDWLEDNLSEGIREWWALKPGVPQPKANQQHQDNRRGLVLPGYKYLGPGNGLDKGEPVNEADAAALEHDKAYDQQLKAGDNPYLKYNHADAEFQERLQEDTSFGGNLGRAVFQAKKRILEPLGLVEEAAKTAPGKKRPVDQSPQEPDSSSGVGKSGKQPARKRLNFGQTGDSESVPDPQPLGEPPAAPTSLGSNTMASGGGAPMADNNEGADGVGNSSGNWHCDSQWLGDRVITTSTRTWALPTYNNHLYKQISGQSGASNDNHYFGYSTPWGYFDFNRFHCHFSPRDWQRLINNNWGFRPKKLSFKLFNIQVKEVTQNDGTTTIANNLTSTVQVFTDSEYQLPYVLGSAHQGCLPPFPADVFMVPQYGYLTLNNGSQAVGRSSFYCLEYFPSQMLRTGNNFQFSYTFEDVPFHSSYAHSQSLDRLMNPLIDQYLYYLNRTQGTTSGTTNQSRLLFSQAGPQSMSLQARNWLPGPCYRQQRLSKTANGNNNSNFPWTAASKYHLNGRDSLVNPGPAMASHKDDEEKFFPMHGNLIFGKEGTTASNAELDNVMITDEEEIRTTNPVATEQCGTVANNLQSSNTAPTTRTVNDQGALPGMVWQDRDVYLQGPIWAKIPHTDGHFHPSPLMGGFGLKHPPPQIMIKNTPVPANPPTTFSPAKFASFITQYSTGQVSVEIEWELQKENSKRWNPEIQYTSNYNKSVNVDFTVDTNGVYSEPRPIGTRYLTRNL

SEQ ID NO: 832 - protein, 736 aa, synthetic construct
  REGION 1..736: note = source = /note="Description of Artificial Sequence: Synthetic polypeptide"
MAADGYLPDWLEDNLSEGIREWWALKPGVPQPKANQQHQDNRRGLVLPGYKYLGPGNGLDKGEPVNEADAAALEHDKAYDQQLKAGDNPYLKYNHADAEFQERLQEDTSFGGNLGRAVFQAKKRILEPLGLVEGAAKTAPGKKRPVDQSPQEPDSSSGVGKSGKQPARKRLNFGQTGDSESVPDPQPLGEPPAAPTSLGSNTMASGGGAPMADNNEGADGVGNSSGNWHCDSQWLGDRVITTSTRTWALPTYNSHLYKQISSQSGASNDNHYFGYSTPWGYFDFNRFHCHFSPRDWQRLINNNWGFRPKKLSFKLFNIQVKEVTQNDGTTTIANNLTSTVQVFTDSEYQLPYVLGSAHQGCLPPFPADAFMVPQYGYLTLNNGSQAVGRSSFYCLEYFPSQMLRTGNNFQFSYTFEDVPFHGSYAHSQSLDRLMNPLIDQYLYYLNRTQGTTSGTTNQSRLLFSQAGPQSMSLQARNWLPGPCYRQQRLSKTANDNNNSNFPWTAASKYHLNGRDSLVNPGPAMASHKDDEEKFFPMHGNLIFGKEGTTASNAELDNVMITDEEEIRTTNPVATEQYGTVANNLQSSNTAPTTRTVNDQGALPGMVWQDRDVYLQGPIWAKIPHTDGHFHPSPLMGGFGLKHPPPQIMIKNTPVPANPPTTFSPAKFASFITQYSTGQVSVEIEWELQKENSKRWNPEIQYTSNYNKSVNVDFTVDTNGVYSEPRPIGTRYLTRNS

SEQ ID NO: 833 - protein, 736 aa, synthetic construct
  REGION 1..736: note = source = /note="Description of Artificial Sequence: Synthetic polypeptide"
MAADGYLPDWLEDNLSEGIREWWALKPGVPQPKANQQHQDNRRGLVLPGYKYLGPGNGLDKGEPVNEADAAALEHDKAYDQQLKAGDNPYLKYNHADAEFQERLQEDTSFGGNLGRAVFQAKKRILEPLGLVEGAAKTAPGKKRPVDQSPQEPDSSSGVGKSGKQLARKRLNFGQTGDSESVPDPQPLGEPPAAPTSLGSNTMASGGGAPMADNNEGADGVGNSSGNWHCDSQWLGDRVITTSTRTWALPTYNSHLYKQISGQSGASNDNHYFGYSTPWGYFDFNRFHCHFSPRDWQRLINNNWGFRPKKLSFKLFNIQVKEVTQNDGTTTIANNLTSTVQVFTDSEYQLPYVLGSAHQGCLPPFPADVFMVPQYGYLTLNNGSQAVGRSSFYCLEYFPSQMLRTGNNFQFSYTFEDVPFHSSYAHSQSLDRLMNPLIDQYLYYLNRTQGTTSGTTNQSRLLFSQAGPQSMSLQARNWLPGPCYRQQRLSKTANDNNNSNFPWTAASKYHLNGRDSLVNPGPAMASHKDDEEKFFPMHGNLIFGKEGTTASNAELDNVMITDEEEIRTTNPVATEQYGTVANNLQSSNTAPTTRTVNDQGALPGMVWQDRDVYLQGPIWAKIPHTDGHFHPSPLMGGFGLKHPPPQIMIKNTPVPANPPTTFSPAKFASFITQYSTGQVSVEIEWELQKENSKRWNPEIQYTSNYNKSVNVDFTVDTNGVYSEPRPIGTRYLTRNL

SEQ ID NO: 834 - protein, 736 aa, synthetic construct
  REGION 1..736: note = source = /note="Description of Artificial Sequence: Synthetic polypeptide"
MAADGYLPDWLEDNLSEGIREWWALKPGVPQPKANQQHQDDRRGLVLPGYKYLGPGNGLDKGEPVNEADAAALEHDKAYDQQLKAGDNPCLKYNHADAEFQERLQEDTSFGGNLGRAVFQAKKRILEPLGLVEEAAKTAPGKKRPVDQSPQEPDSSSGVGKSGKQPARKRLNFGQTGDSESVPDPQPLGEPPAAPTSLGSNTMASGGSAPMADNNEGADGVGNSSGNWHCDSQWLGDRVITTSTRTWALPTYNNHLYKQISSQSGASNDNHYFGYSTPWGYFDFNRFHCHFSPRDWQRLINNNWGFRPKKLSFKLFNIQVKEVTQNDGTTTIANNLTSTVQVFTDSEYQLPYVLGSAHQGCLPPFPADVFMVPQYGYLTLNNGSQAVGRSSFYCLEYFPSQMLRTGNNFQFSYTFEDVPFHSSYAHSQSLDRLMDPLIDQYLYYLNRTQGTTSGTTNQSRLLFSQAGPQSMSLQARNWLPGPCYRQQRLSKTANDNNNSNFPWTAASKYHLNGRDSLVNPGPAMASHKDDEEKFFPMHGNLIFGKEGTTASNAELDNVMITDEEEIRTTNPVATEQYGTVANNLQSSNTAPTTRTVNDQGALPGMVWQDRDVYLQGPIWAKIPHTDGHFHPSPLMGGFGLKHPPPQIMIKNTPVPANPPTTFSPAKFASFITQYSTGQVSVEIEWELQKENSKRWNPEIQYTSNYNKSVNVDFTVDTNGVYSEPRPIGTRYLTRNL

SEQ ID NO: 835 - protein, 736 aa, synthetic construct
  REGION 1..736: note = source = /note="Description of Artificial Sequence: Synthetic polypeptide"
MAADGYLPDWLEDNLSEGIREWWALKPGVPQPKANQQHQDDRRGLVLPGYKYLGPGNGLDKGEPVNEADAAALEHDKAYDQQLKAGDNPYLKYNHADAEFQERLQEDTSFGGNLGRAVFQAKKRILEPLGLVEEAAKTAPGKKRPVDQSPQEPDSSSGVGKSGKQPARKRLNFGQTGDSESVPDPQPLGEPPAAPTSLGSNTMASGGGAPMADNNEGADGVGNSSGNWHCDSQWLGNRVITTSTRTWALPTYNNHLYKQISSQSGASNDNHYFGYSTPWGYFDFNRFHCHFSPRDWQRLINNNWGFRPKKLSFKLFNIQVKEVTQNDGTTTIANNLTSTVQVFTDSEYQLPYVLGSAHQGCLPPFPADVFMVPQYGYLTLNNGSQAVGRSSFYCLEYFPSQMLRTGNNFQFSYTFEDVPFHSSYAHSQSLDRLMNPLIDQYLYYLNRTQGTTSGTTNQSRLLFSQAGPQSMSLQARNWLPGPCYRQQRLSKTANDNNNSNFPWTAASKYHLNGRDSLVNPGPAMASHKDDEEKFFPMHGNLIFGKEGTTASNAELDNVMITDEEEIRTTNPVATEQYGTVANNLQSSNTAPTTRTVNDQGALPGMVWQDRDVYLQGPIWAKIPHTDGHFHPSPLMGGFGLKHPPPQIMIKNTPVPANPPTTFSPAKFASFITQYSTGQVSVEIEWELQKENSKRWNPEIQYTSNYNKSVNVDFTVDTNGVYSEPRPIGTRYLTRNL

SEQ ID NO: 836 - protein, 736 aa, synthetic construct
  REGION 1..736: note = source = /note="Description of Artificial Sequence: Synthetic polypeptide"
MAADGYLPDWLEDNLSEGIREWWALKPGVPQPKANQQHQDDRRGLVLPGYKYLGPGNGLDKGEPVNEADAAALEHDKAYDQQLKAGDNPYLKYNHADAEFQERLQEDTSFGGNLGRAVFQAKKRILEPLGLVEEAAKTAPGKKRPVDQSPQEPDSSSGVGKSGKQPARKRLNFGQTGDSESVPDPQPLGEPPAAPTSLGSNTMASGGGAPMADNNEGADGVGNSSGNWHCDSQWLGDRVITTSTRTWALPTYNNHLYKQISSQSGASNDNHYFGYSTPWGYFDFNRFHCHFSPRDWQRLINNNWGFRPKKLSFKLFNIQVKEVTQNDGTTTIANNLTSTVQVFTDSEYQLPYVLGSAHQGCLPPFPADVFMVPQYGYLTLNNGSQAVGRSSFYCLEYFPSQMLRTGNNFQFSYTFEDVPFHSSYAHSQSLDRLMNPLIDQYLYYLNRTQGTTSGTTNQSRLLFSQAGPQSMSLQARNWLPGPCYRQQRLSKTANDNNNSNFPWTAASKYHLNGRDSLVNPGPAMASHKDDEEKFFPMHGNLIFGKEGTTASNAELDNVMITDEEEIRTTNPVATVQYGTVANNLQSSNTAPTTRTVNDQGALPGMVWQDRDVYLQGPIWAKIPHTDGHFHPSPLMGGFGLKHPPPQIMIKNTPVPANPPTTFSPAKFASFITQYSTGQVSVEIEWELQKENSKRWNPEIQYTSNYNKSVNVDFTVDTNGVYSEPRPIGTRYLTRNL

SEQ ID NO: 837 - protein, 735 aa, synthetic construct
  REGION 1..735: note = source = /note="Description of Artificial Sequence: Synthetic polypeptide"
MAADGYLPDWLEDNLSEGIREWWALKPGVPQPKANQQHQDNRRGLVLPGYKYLGPGNGLDKGEPVNEADAAALEHDKAYDQQLKAGDNPYLKYNHADAEFQERLQEDTSFGGNLGRAVFQAKKGILEPLGLVEEAAKTAPGKKRPVDQSPQEPDSSSGVGKSGKQPARKRLNFGQTGDSESVPDPQPLGEPPAAPTSLGSNTMASGGGAPMADNNEGADGVGNSSGNWHCDSQWLGDRVITTSTRTWALPTYNNHLYKQISSQSGASNDNHYFGYSTPWGYFDFNRFHCHFSPRDWQRLINNNWGFRPKKLSFKLFNIQVKEVTQNDGTTTIANNLTSTVQVFTDSEYQLPYVFGSAHQGCLPPFPADVFMVPQYGYLTLNNGSQAVGRSSFYCLEYFPSQMLRTGNNFQFSYTFEDVPFHSSYAHSQSSDRLMNPLIDQYLYYLNRTQGTTSGTTNQSRLLFSQAGPQSMSLQARNWLPGPCYRQQRLSKTANDNNNSNFPTAASKYHLNGRDSLVNPGPAMASHKDDEEKFFPMHGNLIFGKEGTTASNAELDNVMITDEEEIRTTNPVATEQYGTVANNLQSSNTAPTTRTVNDQGALPGMVWQDRDVYLQGPIWAKIPHTDGHFHPSPLMGGFGLKHPPPQIMIKNTPVPANPPTTFSPAKFASFITQYSTGQVSVEIEWELQKENSKRWNPEIQYTSNYNKSVNVDFTVDTNGVYSEPRPIGTRYLTRNL

SEQ ID NO: 838 - protein, 736 aa, synthetic construct
  REGION 1..736: note = source = /note="Description of Artificial Sequence: Synthetic polypeptide"
MAADGYLPDWLEDNLSEGIREWWALKPGVPQPKANQQHQDNRRGLVLPGYKYLGPGNGLDEGEPVNEADAAALEHDKAYDQQLKAGDNPYLKYNHADAEFQERLQEDTSFGGNLGRAVFQAKKRILEPLGLVEGAAKTAPGKKRPVDQSPQEPDSSSGVGKSGKQPARKRLNFGQTGDSESVPDPQPLGEPPAAPTSLGSNTMASGGGAPMADNNEGADGVGNSSGNWHCDSQWLGDRVITTSTRTWALPTYNSHLYKQISSQSGASNDNHYFGYSTPWGYFDFNRFHCHFSPRDWQRLINNNWGFRPKKLSFKLFNIQVKEVTQNDGTTTIANNLTSTVQVFTDSEYQLPYVLGSAHQGCLPPFPADVFMVPQYGYLTLNNGSQAVGRSSFYCLEYFPSQMLRTGNNFQFSYTFEDVPFHSSYAHSQSLDRLMNPLIDQYLYYLNRTQGTTSGTTNQSRLLFSQAGPQSMSLQARNWLPGPCYRQQRLSKTANDNNNSNFPWTAASKYHLNGRDSLVNPGPAMASHKDDEEKFFPMHGNLIFGKEGTTASNAELDNVMITDEEEIRTTNPVATEQYGTVANNLQSSNTAPTTRTVNDQGALPGMVWQDRDVYLQGPIWAKIPHTDGHFHPSPLMGGFGLKHPPPQIMIKNTPVPANPPTTFSPAKFASFITQYSTGQVSVEIEWELQKENSKRWNPEIQYTSNYNKSVNVDFTVDTNGVYSEPRPIGTRYLTRNL

SEQ ID NO: 839 - protein, 668 aa, synthetic construct
  REGION 1..668: note = source = /note="Description of Artificial Sequence: Synthetic polypeptide"
MAADGYLPDWLEDNLSEGIREWWALKPGVPQPKANQQHQDNRRGLVLPGYKYLGPGNGLDKGEPVNEADAAALEHDKAYDQQLKAGDNPYLKYNHADAEFQERLQEDTSFGGNLGRAVFQAKKRILEPLGLVEGAAKTAPGKKRPVDQSPQEPDSSSGVGKSGKQPARKRLNFGQTGDSESVPDPQPLGEPPAAPTSLGSNTMASGGGAPMADNNEGADGVGNSSGNWHCDSQWLGDRVITTSTRTWALPTYNSHLYKQISSQSGASNDNHYFGYSTPWGILTLTDSTATSHHVTGSDSLTTTGDSGPRNSASSSSTSKLKRSRRTMARRLLPITLPARFKCLRTRSISSRTCSGRRTKAVSRRFQRTPSWSLSMDTSPTTEVKRWDAHPFTAWSTSLRRCGLEITSNSAIPSRMYLFTAATLTARVWIAILLLISICTTTERKEQPLEQPTNHGCFLARLGLSLCLCRPEIGYLGPATGNRDFQRLLTTTTTVTFLGQRPANIISMAATRWIQDQLWPVTRTMKKNFSLCTAIRGPYLAWCGKIVTCTFKDLSGQRFLTRMDTFILLLWEALDNIRLLKSSKILRYRQILRRLSARPSLLHLSLSTPLDRSAWKLSGSYRKKTANVGIQRFSTLPTTTSLLMWTLLTLMVFIVNLALLEPGISHETC

SEQ ID NO: 840 - protein, 734 aa, synthetic construct
  REGION 1..734: note = source = /note="Description of Artificial Sequence: Synthetic polypeptide"
MTDGYLPDWLEDNLSEGVREWWALQPGAPKPKANQQHQDNARGLVLPGYKYLGPGNGLDKGEPVNAADAAALEHDKAYDQQLKAGDNPYLKYNHADAEFQQRLQGDTSFGGNLGRAVFQAKKRVLEPLGLVEQAGETAPGKKRPLIESPQQPDSSTGIGKKGKQPAKKKLVFEDETGAGDGPPEGSTSGAMSDDSEMRAATGGAAVEGGQGADGVGNASGDWHCDSTWSEGHVTTTSTRTWVLPTYNNHLYKRLGESLQSNTYNGFSTPWGYFDFNRFHCHFSPRDWQRLINNNWGMRPKAMRVKIFNIQVKEVTTSNGETTVANNLTSTVQIFADSSYELPYVMDAGQEGSLPPFPNDVFMVPQYGYCGLVTGNTSQQQTDRNAFYCLEYFPSQMLRTGNNFEITYSFEKVPFHSMYAHSQSLDRLMNPLIDQYLWGLQSTTTGTTLNAGTATTNFTKLRPTNLSNFKKNWLPGPSIKQQGFSKTANQNYKIPATGSDSLIKYETHSTLDGRWSALTPGPPMATAGPADSKFSNSQLIFAGPKQNGNTATVPGTLIFTSEEELAATNATDTDMWGNLPGGDQSNSNLPTVDRLTALGAVPGMVWQNRDIYYQGPIWAKIPHTDGHFHPSPLIGGFGLKHPPPQIFIKNTPVPANPATTFSSTPVNSFITQYSTGQVSVQIDWEIQKERSKRWNPEVQFTSNYGQQNSLLWAPDAAGKYTEPRAIGTRYLTHHL

SEQ ID NO: 841 - protein, 734 aa, synthetic construct
  REGION 1..734: note = source = /note="Description of Artificial Sequence: Synthetic polypeptide"
MTDGYLPDWLEDNLSEGVREWWALQPGAPKPKANQQHQDNARGLVLPGYKYLGPGNGLDKGEPVNAADAAALEHDKAYDQQLKAGDNPYLKYNHADAEFQQRLQGDTSFGGNLGRAVFQAKKRVLEPLGLVEQAGETAPGKKRPLIESPQQPDSSTGIGKKGKQPAKKKLVFEDETGAGDGPPEGSTSGAMSDDSEMRAAAGGAAVEGGQGADGVGNASGDWHCDSTWSEGHVTTTSTRTWVLPTYNNHLYKRLGESLQSNTYNGFSTPWGYFDFNRFHCHFLPRDWQRLINNNWGVRPKAMRVKIFNIQVKEVTTSNGETTVANNLTSTVQIFADSSYELPYVMDAGQEGSLPPFPNDVFMVPQYGYCGLVTGDTSQQQTDRNAFYCLEYFPSQMLRTGNNFEITYSFEKVPFHSMYAHSQSLDRLMNPLIDQYLWGLQSTTTGTTLNAGTATTNFTKLRPTNFSNFKKNWLPGPSIKQQGFSKTANQNYKIPATGSDSLIKYETHSTLDGRWSALTPGPPMATAGPADSKFSNSQLIFAGPKQNGNTATVPGTLIFTSEEELAATNATDTDMWGNLPGGDQSNSNLPTVDRLTALGAVPGMVWQNRDIYYQGPIWAKIPHTDGHFHPSPLIGGFGLKHPPPQIFIKNTPVPANPATTFSSTPVNSFITQYSTGQVSVQIDWEIQKERSKRWNPEVQFTSNYGQQNSLLWAPDAAGKYTEPRAIGTRYLTHHL

SEQ ID NO: 842 - protein, 734 aa, synthetic construct
  REGION 1..734: note = source = /note="Description of Artificial Sequence: Synthetic polypeptide"
MTDGYLPDWLEDNLSEGVREWWALQPGAPKPKANQQHQDNARGLVLPGYKYLGPGNGLDEGEPVNAADAAALEHDKAYDQQLKAGDNPYLKYNHADAEFQQRLQGDTSFGGNLGRAVFQAKKRVLEPLGLVEQAGETAPGKKRPLIESPQQPDSSTGIGKKGKQPAKKKLVFEDETGAGDGPPEGSTSGAMSDDSEMRAAAGGAAVEGGQGADGVGNASGDWHCDSTWSEGHVTTTSTRTWVLPTYNNHLYKRLGESLQSNTYNGFSTPWGYFDFNRFHCHFSPRDWQRLINNNWGMRPKAMRVKIFNIQVKEVTTSNGETTVANNLTSTVQIFADSSYELPYVMDAGQEGSLPPFPNDVFMVPQYGYCGLVTGNTSQQQTDRNAFYCLEYFPSQMLRTGNNFEITYSFEKVPFHSMYAHSQSLDRLMNPLIDQYLWGLQSTTTGTTLNAGTATTNFTKLRPTNFSNFKKNWLPGPSIKQQGFSKTANQNYKIPATGSDSLIKYETHSTLDGRWSALTPGPPMATAGPADSKFSNSQLIFAGPKQNGNTATVPGTLIFTSEEELAATNATDTDMWGNLPGGDQSNSNLPTVDRLTALGAVPGMVWQNRDIYYQGPIWAKIPHTDGHFHPSPLIGGFGLKHPPPQIFIKNTPVPANPATTFSSTPVNSFITQYSTGQVSVQIDWEIQKERSKRWNPEVQFTSNYGQQNSLLWAPDAAGKYTEPRAIGTRYLTHHL

SEQ ID NO: 843 - protein, 734 aa, synthetic construct
  REGION 1..734: note = source = /note="Description of Artificial Sequence: Synthetic polypeptide"
MTDGYLPDWLEDNLSEGVREWWALQPGAPKPKANQQHQDNARGLVLPGYKYLGPGNGLDKGEPVNAADAAALEHDKAYDQQLKAGDNPYLKYNHADAEFQQRLQGDTSFGGNLGRAVFQAKKRVLEPLGLVEQAGETAPGKKRPLIESPQQPDSSTGIGKKGKQPAKKKLVFEDGTGAGDGPPEGSTSGAMSDDSEMRAAAGGAAVEGGQGADGVGNASGDWHCDSTWSEGHVTTTSTRTWVLPTYNNHLYKRLGESLQSNTYNGFPTPWGYFDFNRFHCHFSPRDWQRLINNNWGMRPKAMRVKIFNIQVKEVTTSNGETTAANNLTSTVQIFADSSYELPYVMDAGQEGSLPPFPNDVFMVPQYGYCGLVTGNTSQQQTDRNAFYCLEYFPSQMLRTGNNFEITYSFEKVPFHSMYAHSQSLDRLMNPLIDQYLWGLQSTTTGTTLNAGTATTNFTKLRPTNFSNFKKNWLPGPSIKQQGFSKTANQNYKIPATGSDSLIKYETHSTLDGRWSALTPGPPMATAGPADSKFSNSQLIFAGPKQNGNTATVPGTLIFTSEEELAATNATDTDMWGNLPGGDQSNSNLPTVDRLTALGAVPGMVWQNRDIYYQGPIWAKIPHTDGHFHPSPLIGGFGLKHPPPQIFIKNTPVPANPATTFSSTPVNSFITQYSTGQVSVQIDWEIQKERSKRWNPEVQFTSNYGQQNSLLWAPDAAGKYTEPRAIGTRYLTHHL

SEQ ID NO: 844 - protein, 734 aa, synthetic construct
  REGION 1..734: note = source = /note="Description of Artificial Sequence: Synthetic polypeptide"
MTDGYLPDWLEDNLSEGVREWWALQPGAPKPKANQQHQDNARGLVLPGYKYLGPGNGLDKGEPVNAADAAALEHDKAYDQQLKAGDNPYLKYNHADAEFQQRLQGDTSFGGNLGRAVFQAKKRVLEPLGLVEQAGETAPGKKRPLIESPQQPDSSTGIGKKGKQPAKKKLVFEDETGAGDGPPEGSTSGAMSDDSEMRAAAGGAAVEGGQGADGVGNASGDWHCDSTWSEGHVTTTSTRTWVLPTYNNHLYKRLGESLQSNTYNGFSTPWGYFDFNRFHCHFSPRDWQRLINNNWGMRPKAMRVKIFNIQVKEVTTSNGETTVANNLTSTVQIFADSSYELPYVMDAGQEGSLPPFPNDVFMVPQYGYRGLVTGNTSQQQTDRNAFYCLEYFPSQMLRTGNNFEITYSFEKVPFHSMYAHSQSLDRLMNPLIDQYLWGLQSTTTGTTLNAGTATTNFTKLRPTNFSNFKKNWLPGPSIKQQGFSKTANQNYKIPATGSDSLIKYETHSTLDGRWSALTPGPPMATAGPADSKFSNSQLIFAGPKQNGNTATVPGTLIFTSEEELAATNATDTDMWGNLPGGDQSNSNLPTVDRLTALGAVPGMVWQNRDIYYQGPIWAKIPHTDGHFHPSPLIGGFGLKHPPPQIFIKNTPVPANPATTFSSTPVNSFITQYSTGQVSVQIDWEIQKERSKRWNPEVQFTSNYGQQNSLLWAPDAAGKYTEPRAIGTRYLTHHL

SEQ ID NO: 845 - protein, 734 aa, synthetic construct
  REGION 1..734: note = source = /note="Description of Artificial Sequence: Synthetic polypeptide"
MTDGYLPDWLEDNLSEGVREWWALQPGAPKPKANQQHQDNARGLVLQGYKYLGPGNGLDKGEPVNAADAAALEHDKAYDQQLKAGDNPYLKYNHADAEFQQRLQGDTSFGGNLGRAVFQAKKRVLEPLGLVEQAGETAPGKKRPLIESPQQPDSSTGIGKKGKQPAKKKLVFEDETGAGDGPPEGSTSGAMSDDSEMRAAAGGAAVEGGQGADGVGNASGDWHCDSTRSEGHVTTTSTRTWVLPTYNNHLYKRLGESLQSNTYNGFSTPWGYFDFNRFHCHFSPRDWQRLINNNWGMRPKAMRVKIFNIQVKEVTTSNGETTVANNLTSTVQIFADSSYELPYVMDAGQEGSLPPFPNDVFMVPQYGYCGLVTGNTSQQQTDRNAFYCLEYFPSQMLRTGNNFEITYSFEKVPFHSMYAHSQSLDRLMNPLIDQYLWGLQSTTTGTTLNAGTATTNFTKLRPTNFSNFKKNWLPGPSIKQQGFSKTANQNYKIPATGSDSLIKYETHSTLDGRWSARTPGPPMATAGPADSKFSNSQLIFAGPKQNGNTATVPGTLIFTSEEELAATNATDTDMWGNLPGGDQSNSNLPTVDRLTALGAVPGMVWQNRDIYYQGPIWAKIPHTDGHFHPSPLIGGFGLKHPPPQIFIKNTPVPANPATTFSSTPVNSFITQYSTGQVSVQIDWEIQKERSKRWNPEVQFTSNYGQQNSLLWAPDAAGKYTEPRAIGTRYLTHHL

SEQ ID NO: 846 - protein, 724 aa, synthetic construct
  REGION 1..724: note = source = /note="Description of Artificial Sequence: Synthetic polypeptide"
MSFVDHPPDWLEEVGEGLREFLGLEAGPPKPKPNQQHQDQARGLVLPGYNYLGPGNGLDRGEPVNRADEVAREHDISYNEQLEAGDNPYLKYNHADAEFQERLADDTSFGGNLGKAVFQAKKRVLEPFGLVEEGAKTAPTGKRIDDHFPKRKKARTEEDSKPSTSSDAEAGPSGSQQLQIPAQPASSLGADTMSAGGGGPLGDNNQGADGVGNASGDWHCDSTWMGDRVVTKSTRTWVLPSYNNHQYREIKSGSVDGSNANAYFGYSTPWGYFDFNRFHSHWSPRDWQRLINNYWGFRPRSLRVKIFNIQVKEVTVQDSTTTIANNLTSTVQVFTDDDYQLPYVVGNGTEGCLPAFPPQVFTLPQYGYATLNRDNTENPTERSSFFCLEYFPSKMLRTGNNFEFTYNFEEVPFHSSFAPSQNLFKLANPLVDQYLYRFVSTNNTGGVQFNKNLAGRYANTYKNWFPGPMGRTQGWNLGSGVNRASVSAFATTNRMELEGASYQVPPQPNGMTNNLQGSNTYALENTMIFNSQPANPGTTATYLEGNMLITSESETQPVNRVAYNVGGQMATNNQSSTTAPATGTYNLQEIVPGSVWMERDVYLQGPIWAKIPETEAHFHPSPAMGGFGLKHPPPMMLIKNTPVPGNITSFSDVPVSSFITQYSTGQVTVEMEWELKKENSKRWNPEIQYTNNYNDPQFVDFAPDSTGEYRTTRPIGTRYLTRPL

SEQ ID NO: 847 - protein, 724 aa, synthetic construct
  REGION 1..724: note = source = /note="Description of Artificial Sequence: Synthetic polypeptide"
MSFVDHPPDWLEEVGEGLREFLGLEAGPPKPKPNQQHQDQARGLVLPGYNYLGPGNGLDRGEPVNRADEVAREHDISYNEQLEAGDNPYLKYNHADAEFQEKLADDTSSGGNLGKAVFQAKKRVLEPFGLVEEGAKTAPTGKRIDDHFPKRKKARTEEDSKPSTSSDAEAGPSGSQQLQIPAQPASSLGADTMSAGGGGPLGDNNQGADGVGNASGDWHCDSTWMGDRVVTKSTRTWVLPSYNNHQYREIKSGSVDGSNANAYFGYSTPWGYFDFNRFHSHWSPRDWQRLINNYWGFRPRSLRVKIFNIQVKEVTVQDSTTTIANNLTSTVQVFTDDDYQLPYVVGNGTEGCLPAFPPQVFTLPQYGYATLNRDNTENPTERSSFFCLEYFPSKMLRTGNNFEFTYNFEEVPFHSSFAPSQNLFKLANPLVDQYLYRFVSTNNTGGVQFNKNLAGRYANTYKNWFPGPMGRTQGWNLGSGVNRASVSAFATTNRMELEGASYQVPPQPNGMTNNLQGSNTYALENTMIFNSQPANPGTTATYLEGNMLITSESETQPVNRVAYNVGGQMATNNQSSTTAPATGTYNLQEIVPGSVWMERDVYLQGPIWAKIPETGAHFHPSPAMGGFGLKHPPPMMLIKNTPVPGNITSFSDVPVSSFITQYSTGQVTVEMEWELKKENSKRWNPEIQYTNNYNDPQFVDFAPDSTGEYRTTRPIGTRYLTRPL

SEQ ID NO: 848 - protein, 724 aa, synthetic construct
  REGION 1..724: note = source = /note="Description of Artificial Sequence: Synthetic polypeptide"
MSFVDHPPDWLEEVGEGLREFLGLEAGPPKPKPNQQHQDQARGLVLPGYNYLGPGNGLDRGEPVNRADEVAREHDISYNEQLEAGDNPYLKYNHADAEFQEKLADDTSFGGNLGKAVFQAKKRVLEPFGLVEEGAKTAPTGKRIDDHFPKRKKARTEEDSKPSTSSDAEAGPSGSQQLQIPAQPASSLGADTMSAGGGGPLGDNNQGADGVGNASGDWHCDSTWMGDRVVTKSTRTWVLPSYNNHQYREIKSGSVDGSNANAYFGYSTPWGYFDFNRFHSHWSPRDWQRLINNYWGFRPRSLRVKIFNIQVKEVTVQDSTTTIANNLTSTVQVFTDDDYQLPYVVGNGTEGCLPAFPPQVFTLPQYGYATLNRDNTENPTERSSFFCLEYFPSKMLRTGNNFEFTYNFEEVPFHSSFAPSQNLFKLANPLVDQYLYRFVSTNNTGGVQFNKNLAGRYANTYKNWFPGPMGRTQGWNLGSGVNRASVSAFATTNRMELEGASYQVPPQPNGMTNNLQGSNTYALENTMIFNSQPANPGTTATYLEGNMLITSESETQPVNRVAYNVGGQMATNNQSSTTAPATGTYNLQEIVPGSVWMERDVYLQGPIWAKIPETGAHFHPSPAMGGFGLKHPPPMMLIKSTPVPGNITSFSDVPVSSFITQYSTGQVTVEMEWELKKENSKRWNPEIQYTNNYNDPQFVDFAPDSTGEYRTTRPIGTRYLTRPL

SEQ ID NO: 849 - protein, 724 aa, synthetic construct
  REGION 1..724: note = source = /note="Description of Artificial Sequence: Synthetic polypeptide"
MSFVDHPPDWLEEVGEGLREFLGPEAGPPKPKPNQQHQDQARGLVLPGYNYLGPGNGLDRGEPVNRADEVAREHDISYNEQLEAGDNPYLKYNHADAEFQEKLADDTSFGGNLGKAVFQAKKRVLEPFGLVEEGAKTAPTGKRIDDHFPKRKKVRTEEDSKPSTSSDAEAGPSGSQQLQIPAQPASSLGADTMSAGGGGPLGDNNQGADGVGNASGDWHCDSTWMGDRVVTKSTRTWVPPSYNNHQYREIKSGSVDGSNANAYFGYSTPWGYFDFNRFHSHWSPRDWQRLINNYWGFRPRSLRVKIFNIQVKEVTVQDSTTTIANNLTSTVQVFTDDDYQLPYVVGNGTEGCLPAFPPQVFTLPQYGYATLNRDNTENPTERSSFFCLEYFPSKMLRTGNNFEFTYNFEEVPFHSSFAPSQNLFKLANPLVDQYLYRFVSTNNTGGVQFNKNLAGRYANTYKNWFPGPMGRTQGWNLGSGVNRASVSAFATTNRMELEGASYQVPPQPNGMTNNLQGSNTYALENTMIFNSQPANPGTTATYLEGNMLITSESETQPVNRVACNVGGQMATNNQSSTTAPATGTYNLQEIVPGSVWMERDVYLQGPIWAKIPETGAHFHPSPAMGGFGLKHPPPMMLIKNTPVPGNITSFSDVPVSSFITQYSTGQVTVEMEWELKKENSKRWNPEIQYTNNYNDPQFVDFAPDSTGEYRTTRPIGTRYLTRPL

SEQ ID NO: 850 - protein, 724 aa, synthetic construct
  REGION 1..724: note = source = /note="Description of Artificial Sequence: Synthetic polypeptide"
MSFVDHPPDWLEEVGEGLREFLGLEAGPPKPKPNQQHQDQARGLVLPGYNYLGPGNGLDRGEPVNRADEVAREHDISYNEQLEAGDNPYLKYNHADAEFQEKLADDTSFGGNLGKAVFQAKKRVLEPFGLVEEGAKTAPTGKRIDDHFPKRKKARTEEDSKPSTSSDAEAGPSGSQQLQIPAQPASSLGADTMSAGGGGPLGDNNQGADGVGNASGDWHCDSTWMGDRVVTKSTRTWVLPSYNNHQYREIKSGSVDGSNANAYFGYSTPWGYFDFNRFHSHWSPRDWQRLINNYWGFRPRSLRVKIFNIQVKEVTVQDSTTTIANNLTSTVQVFTDDDYQLPYVVGNGTEGCLPAFPPQVFTLPQYGYATLNRDNTENPTERSSFFCLEYFPSKMLRTGNNFEFTYNFEEVPFHSSFAPSQNLFKLANPLVDQYLYRFVSTNNTGGVQFNKNLAGRYANTYKNWFPGPMGRTQGWNLGSGVNRASVSAFATTNRMELEGASYQVPPQPNGMTNNLQGSNTYALENTMIFNSQPANPGTTATYLEGNMLITSESETQPVNRVAYNVGGQMATNNQSSTTAPATGAYNLQEIVPGSVWMERDVYLQGPIWAKIPETGAHFHPSPAMGGFGLKHPPPMMLIKNTPVPGNITSFSDVPVSSFITQYSTGQVTVEMEWELKKENSKRWNPEIQYTNNYNDPQFVDFAPDSTGEYRTTRPIGTRYLTRPL

SEQ ID NO: 851 - protein, 724 aa, synthetic construct
  REGION 1..724: note = source = /note="Description of Artificial Sequence: Synthetic polypeptide"
MSFVDHPPDWLEEVGEGLREFLGLEAGPPKPKPNQQHQDQARGLVLPGYNYLGPGNGLDRGEPVNRADGVAREHDISYNEQLEAGDNPYLKYNHADAEFQEKLADDTSFGGNLGKAVFQAKKRVLEPFGLVEEGAKTAPTGKRIDDHFPKRKKARTEEDSKPSTSSDAEAGPSGSQQLQIPAQPASSLGADTMSAGGGGPLGDNNQGADGVGNASGDWHCDSTWMGDRVVTKSTRTWVLPSYNNHQYREIKSGSVDGSNANAYFGYSTPWGYFDFNRFHSHWSPRDWQRLINNYWGFRPRSLRVKIFNIQVKEVTVQDSTTTIANNLTSTVQAFTDDDYQLPYVVGNGTEGCLPAFPPQVFTLPQYGYATLNRDNTENPTERSSFFCLEYFPSKMLRTGNNFEFTYNFEEVPFHSSFAPSQNLFKLANPLVDQYLYRFVSTNNTGGVQFNKNLAGRYANTYKNWFPGPMGRTQGWNLGSGVNRASVSAFATTNRMELEGASYQVPPQPNGMTNNLQGSNTYALENTMIFNSQPANPGTTATYLEGNMLITSESETQPVNRVAYNVGGQMATNNQSSTTAPATGTYNLQEIVPGSVWMERDVYLQGPIWAKIPETGAHFHPSPAMGGFGLKHPPPMMLIKNTPVPGNITSFSDVPVSSFITQYSTGQVTVEMEWELKKENSKRWNPEIQYTNNYNDPQFVDFAPDSTGEYRTTRPIGTRYLTRPL

SEQ ID NO: 852 - protein, 723 aa, synthetic construct
  REGION 1..723: note = source = /note="Description of Artificial Sequence: Synthetic polypeptide"
MSFVDHPPDWLEEVGEGLREFLGLEAGPPKPKPNQQHQDQARGLVLPGYNYLGPGNGLDRGEPVNRADEVAREHDISYNEQLEAGDNPYLKYNHADAEFQEKLADDTSFGGNLGKAVFQAKKRVLEPFGLVEEGAKTAPTGKRIDDHFPKRKKARTEEDSKPSTSSDAEAGPSGSQQLQIPAQPASSLGADTMSAGGGGPLGDNNQGADGVGNASGDWHCDSTWMGDRVVTKSTRTWVLPSYNNHQYREIKSGSVDGSNANAYFGYSTPWGYFDFNRFHSHWSPRDWQRLINNYWGFRPRSLRVKIFNIQVKEVTVQDSTTTIANNLTSTVQVFTDDDYQLPYVVGNGTEGCLPAFPPQVFTLPQYGYATLNRDNTENPTERSSFFCLEYFPSKMLRTGNNFEFTYNFEEVPFHSSFAPSQNLFKLANPLVDQYLYRFVSTNNTGGVQFNKNLAGRYANTYKNWFPGPMGRTQGWNLGSGVNRASVSAFATTNRMELEGASYVPPQPNGMTNNLQGSNTYALENTMIFNSQPANPGTTATYLEGNMLITSESETQPVNRVAYNVGGQMATNNQSSTTAPATGTYNLQEIVPGSVWMEGDVYLQGPIWAKIPETGAHFHPSPAMGGFGLKHPPPMMLIKNTPVPGNITSFSDVPVSSFITQYSTGQVTVEMEWELKKENSKRWNPEIQYTNNYNDPQFVDFAPDSTGEYRTTRPIGTRYLTRPL

SEQ ID NO: 853 - protein, 724 aa, synthetic construct
  REGION 1..724: note = source = /note="Description of Artificial Sequence: Synthetic polypeptide"
MSFVDHPPDWLEEVGEGLREFLGLEAGPPKPKPNQQHQDQARGLVLPGYNYLGPGNGLDRGEPVNRADEVAREHDISYNEQLEAGDNPYLKYNHADAEFQEKLADDTSFGGNLGKAVFQAKKRVLEPFGLVEEGAKTAPTGKRIDDHFPKRKKVRTEEDSKPSTSSDAEAGPSGSQQLQIPAQPASSLGADTMSAGGGGPLGDNNQGADGVGNASGDWHCDSTWMGDRVVTKSTRTWVLPSYNNHQYREIKSGSVDGSNANAYFGYSTPWGYFDFNRFHSHWSPRDWQRLINNYWGFRPRSLRVKIFNIQVKEVTVQDSTTTIANNLTSTVQVFTDDDYQLPYVVGNGTEGCLPAFPPQVFTLPQYGYATLNRDNTENPTERSSFFCLEYFPSKMLRTGNNFEFTYNFEEVPFHSSFAPSQNLFKLANPLVDQYLYRFVSTNNTGGVQFNKNLAGRYANTYKNWFPGPMGRTQGWNLGSGVNRASVSAFATTNRMELEGASYQVPPQPNGMTNNLQGSNTYALENTMIFNSQPANPGTTATYLEGNMLITSESETQPVNRVAYNVGGQMATNNQSSTTAPATGTYNLQEIVPGSVWMERDVYLQGPIWAKIPETGAHFHPSPAMGGFGLKHPPPMMLIKNTPVPGNITSFSDVPVSSFITQYSTGQVTVEMEWELKKENSERWNPEIQYTNNYNDPQFVDFAPDSTGEYRTTRPIGTRYLTRPL

SEQ ID NO: 854 - protein, 724 aa, synthetic construct
  REGION 1..724: note = source = /note="Description of Artificial Sequence: Synthetic polypeptide"
MSFVDHPPDWLEEVGEGLREFLGLEAGPPKPKPNQQHQDQARGLVLPGYNYLGPGNGLDRGEPVNRADEVAREHDISYSEQLEAGDNPYLKYNHADAEFQEKLADDTSFGGNLGKAVFQAKKRVLEPFGLVEEGAKTAPTGKRIDDHFPKRKKARTEEDSKPSTSSDAEAGPSGSQQLQIPAQPASSLGADTMSAGGGGPLGDNNQGADGVGNASGDWHCDSTWMGDRVVTKSTRTWVLPSYNNHQYREIKSGSVDGSNANAYFGYSTPWGYFDFNRFHSHWSPRDWQRLINNYWGFRPRSLRVKIFNIQVKEVTVQDSTTTIANNLTSTVQVFTDDDYQLPYVVGNGTEGCLPAFPPQVFTLPQYGYATLNRDNTENPTERSSFFCLEYFPSKMLRTGNNFEFTYNFEEVPFHSSFAPSQNLFKLANPLVDQYLYRFVSTNNTGGVQFNKNLAGRYANTYKNWFPGPMGRTQGWNLGSGVNRASVSAFATTNRMELEGASYQVPPQPNGMTNNLQGSNTYALENTMIFNSQPANPGTTATYLEGNMLITSESETQPVNRVAYNVGGQMATNNQSSTTAPATGTYNLQEIVPGSVWMERDVYLQGPIWAKIPETGAHFHPSPAMGGFGLKHPPPMMLIKNTPVPGNITSFSDVPVSSFITQYSTGQVTVEMEWELKKENSKRWNPEIQYTNNYNDPQFVDFAPDSTGEYRTARPIGTRYLTRPL

SEQ ID NO: 855 - protein, 724 aa, synthetic construct
  REGION 1..724: note = source = /note="Description of Artificial Sequence: Synthetic polypeptide"
MSFVDHPPDWLEEVGEGLREFLGPEAGPPKPKPNQQHQDQARGLVLPGYNYLGPGNGLDRGEPVNRADEVAREHDISYNEQLEAGDNPYLKYNHADAEFQEKLADDTSFGGNLGKAVFQAKKRVLEPFGLVEEGAKTAPTGKRIDDHFPKRKKARTEEDSKPSTSSDAEAGPSGSQQLQIPAQPASSLGADTMSAGGGGPLGDNNQGADGVGNASGDWHCDSTWMGDRVVTKSTRTWVLPSYNNHQYREIKSGSVDGSNANAYFGYSTPWGYFDFNRFHSHWSPRDWQRLINNYWGFRPRSLRVKIFNIQVKEVTVQDSTTTIANNLTSTVQVFTDDDYQLPYVVGNGTEGCLPAFPPQVFTLPQYGYATLNRDNTENPTERSSFFCLEYFPSKMLRTGNNFEFTYNFEEVPFHSSFAPSQNLFKLANPLVDQYLYRFVSTNNTGGVQFNKNLAGRYANTYKNWFPGPMGRTQGWNLGSGVNRASVSAFATTNRMELEGASYQVPPQPNGMTNNLQGSNTYALENTMIFNSQPANPGTTATYLEGNMLITSESETQPVNRVAYNVGGQMTTNNQSSTTAPATGTYNLQEIVPGSVWMERDVYPQGPIWAKIPETGAHFHPSPAMGGFGLKHPPPMMLIKNTPVPGNITSFSDVPVSSFITQYSTGQVTVEMEWELKKENSKRWNPEIQYTNNYNDPQFVDFAPDSTGEYRTTRPIGTRYLTRPL

SEQ ID NO: 856 - protein, 724 aa, synthetic construct
  REGION 1..724: note = source = /note="Description of Artificial Sequence: Synthetic polypeptide"
MSFVDHPPDWLEEVGEGLREFLGLEAGPPKPKPNQQHQDQARGLVLPGYNYLGPGNGLDRGEPVNRADEVAREHDISYNEQLEAGDNPYLKYNHADAEFQEKLADDTSFGGNLGKAVFQAKKRVLEPFGLVEEGAKTAPTGKRIDDHFPKRKKARTEEDSKPSTSSDAEAGPSGSQQLQIPAQPASSLGADTMSAGGGGPLGDNNQGADGVGNASGDWHCDSTWMGDRVVTKSTRTWVLPSYNNHQYREIKSGSVDGSNANAYFGYSTPWGYFDFNRFHSHWSPRDWQRLINNYWGFRPRSLRVKIFNIQVKEVTVQDSTTTIANNLTSTVQVFTDDDYQLPYVVGNGTEGCLPAFPPQVFTLPQYGYATLNRDNTENPTERSSFLCLEYFPSKMLRTGNNFEFTYNFEEVPFHSSFAPSQNLFKLANPLVDQYLYRFVSTNNTGGVQFNKNLAGRYANTYKNWFPGPMGRTQGWNLGSGVNRASVSAFATTNRMELEGASYQVPPQPNGMTNNLQGSNTYALENTMIFNSQPANPGTTATYLEGNMLITSESETQPVNRVAYNVGGQMATNNQSSTTAPATGTYNLQEIVPGSVWMKRDVYLQGPIWAKIPETGAHFHPSPAMGGFGLKHPPPMMLIKNTPVPGNITSFSDVPVSSFITQYSTGQVTVEMEWELKKENSKRWNPEIQYTNNYNDPQFVDFAPDSTGEYRTTRPIGTRYLTRPL

SEQ ID NO: 857 - protein, 724 aa, synthetic construct
  REGION 1..724: note = source = /note="Description of Artificial Sequence: Synthetic polypeptide"
MSFVDHPPDWLEEVGEGLREFLGLEAGPPKPKPNQQHQDQARGLVLPGYNYLGPGNGLDRGEPVNRADEVAREHDISYNEQLEAGDNPYLKYNHADAEFQEKLADDTSFGGNLGKAVFQAKKRVLEPFGLVEEGAKTAPTGKRIDDHFPKRKKARTEEDSKPSTPSDAEAGPSGSQQLQIPAQPASSLGADTMSAGGGGPLGDNNQGADGVGNASGDWHCDSTWMGDRVVTKSTRTWVLPSYNNHQYREIKSGSVDGSNANAYFGYSTPWGYFDFNRFHSHWSPRDWQRLINNYWGFRPRSLRVKIFNIQVKEVTVQDSTTTIANNLTSTVQVFTDDDYQLPYVVGNGTEGCLPAFPPQVFTLPQYGYATLNRDNTENPTERSSFFCLEYFPSKMLRTGNNFEFTYNFEEVPFHSSFAPSQNLFKLANPLVDQYLYRFVSTNNTGGVQFNKNLAGRYANTYKNWFPGPMGRTQGWNLGSGVNRASVSAFATTNRMELEGASYQVPPQPNGMTNNLQGSNTYALENTMIFNSQPANPGTTATYLEGNMLITSESETQPVNRVAYNVGGQMATNNQSSTTAPATGTYNLQEIVPGSVWMERDVYLQGPIWAKIPETGAHFHPSPAMGGFGLKHPPPMMLIKNTPVPGNITSFSDVPVSSFITQYSTGQVTVEMEWELKKENSKRWNPEIQYTNNYNDPQFVDFAPDSTGEYRTTRPIGTRYLTRPL

SEQ ID NO: 858 - protein, 724 aa, synthetic construct
  REGION 1..724: note = source = /note="Description of Artificial Sequence: Synthetic polypeptide"
MSFVDHPPDWLEEVGEGLREFLGLEAGPPKPKPNQQHQDQARGLVLPGYNYLGPGNGLDRGEPVNRADEVAREHDISYNEQLEAGDNPYLKYNHADAEFQEKLADDTSFGGNLGKAVFQAKKRVLEPFGLVEEGAKTAPTGKRIDDHFPKRKKARTEEDSKPSTSSDAEAGPSGSQQLQIPAQPASSLGADTMSAGGGGPLGDNNQGADGVGNASGDWHCDSTWMGDRVVTKSTRTWVLPSYNNHQYREIKSGSVDGSNANAYFGYSTPWGYFDFNRFHSHWSPRDWQRLINNYWGFRPRSLRVKIFNIQVKEVTVQDSTTTIANNLTSTVQVFTDDDYQLPYVVGNGTEGCLPAFPPQVFTLPQYGYATLNRDNTENPTERSSFFCLEYFPSKMLRTGNNFEFTYNFEEVPFHSSFAPSQNLFKLANPLVDQYLYRFVSTNNTGGVQFNKNLAGRYANTHKNWFPGPMGRTQGWNLGSGVNRASVSAFATTNRMELEGASYQVPPQSNGMTNNLRGSNTYALENTMIFNSQPANPGTTATYLEGNMLITSESETQPVNRVAYNVGGQMATNNQSSTTAPATGTYNLQEIVPGSVWMERDVYLQGPIWAKIPETGAHFHPSPAMGGFGLKHPPPMMLIKNTPVPGNITSFSDVPVSSFITQYSTGQVTVEMEWELKKENSKRWNPEIQYTNNYNDPQFVDFAPDSTGEYRTTRPIGTRYLTRPL

SEQ ID NO: 859 - protein, 724 aa, synthetic construct
  REGION 1..724: note = source = /note="Description of Artificial Sequence: Synthetic polypeptide"
MSFVDHPPDWLEEVGEGLREFLGLEAGPPKPKPNQQHQDQARGLVLPGYNYLGPGNGLDRGEPVNRADEVAREHDISYNEQLEAGDNPYLKYNHADAEFQEKLADDTSFGGNLGKAVFQAKKRVLEPFGLVEEGAKTAPTGKRIDDHFPKRKKARTEEDSKPSTSSDAEAGPSGSQQLQIPAQPASSLGADTMSAGGGGPLGDNNQGADGVGNASGDWHCDSTWMGDRVVTKSTRTWVLPSYNNHQYREIKSGSVDGSNANAYFGYSTPWGYFDFNRFHSHWSPRDWQRLINNYWGFRPRSLRVKIFNIQVKEVTVQDSTTTIANNLTSTVQVFTDDDYQLPYVVGNGTEGCLPAFPPQVFTLPQYGYATLNRDNTENPTERSSFFCLEYFPSKMLRTGNNFEFTYNFEEVPFHSSFAPSQNLFKLANPLVDQYLYRFVSTNNTGGVQFNKNLAGRYANTYKNWFPGPMGRTQGWNLGSGVNRASVSAFATTNRMELEGASYQVPPQPNGMTNNLQGSNTYALENTMIFNSQPANPGTTATYLEGNMLITSESETQPVNRVAYSVGGQMATNNQSSTTAPTTGTYNLQEIVPGSVWMERDVYLQGPIWAKIPETGAHFHPSPAMGGFRLKHPPPMMLIKNTPVPGNITSFSDVPVSSFITQYSTGQVTVEMEWELKKENSKRWNPEIQYTNNYNDPQFVDFAPDSTGEYRTTRPIGTRYLTRPL

SEQ ID NO: 860 - protein, 724 aa, synthetic construct
  REGION 1..724: note = source = /note="Description of Artificial Sequence: Synthetic polypeptide"
MSFVDHPPDWLEEVGEGLREFLGLEAGPPKPKPNQQHQDQARGLVLPGYNYLGPGNGLDRGEPVNRADEVAREHDISYNEQLEAGDNPYLKYNHADAEFQEKLADDTSFGGNLGKAVFQAKKRVLEPFGLVEEGAKTAPTGKRIDDHFPKRKKARTEEDSKPSTSSDAEAGPSGSQQLQIPAQPASSLGADTMSAGGGGPLGDNNQGADGVGNASGDWHCDSTWMGDRVVTKSTRTWVLPSYNNHQYREIKSGSVDGSNANAYFGYSTPWGYFDFNRFHSHWSPRDWQRLINNYWGFRPRSLRVKIFNIQVKEVTVQDSTTTIANNLTSTVQVFTDDDYQLPYVVGNGTEGCLPAFPPQVFTLPQYGYATLNRDNTENPTERSSFFCLEYFPSKMLRTGNNFEFTYNFEEVPFHSSFAPSQNLFKLANPLVDQYLYRFVSTNNTGGVQFNKNLAGRYANTYKNWFPGPMGRTQGWNLGSGVNRASVSAFAATNRMELEGASYQVPPQPNGMTNNLQGSNTYALENTMIFNSQPANPGTTATYLEGNMLITSESETQPVNRVAYNVGGQMATNNQSSTTAPATGTYNLQEIVPGGVWMERDVYLQGPIWAKIPETGAHFHPSPAMGGFGLKHPPPMMLIKNTPVPGNTTSFSDVPVSSFITQYSTGQVTVEMEWELKKENSKRWNPEIQYTNNYNDPQFVDFAPDSTGEYRTTRPIGTRYLTRPL

SEQ ID NO: 861 - protein, 724 aa, synthetic construct
  REGION 1..724: note = source = /note="Description of Artificial Sequence: Synthetic polypeptide"
MSFVDHPPDWLEEVGEGLREFLGLEAGPPKPKPNQQHQDQARGLVLPGYNYLGPGNGLDRGEPVNRADEVAREHDISYNEQLEAGDNPYLKYNHADAEFQEKLADDTSFGGNLGKVVFQAKKRVLEPFGLVEEGAKTAPTGKRIDDHFPKRKKARTEEDSKPSTSSDAEAGPSGSQQLQIPAQPASSLGADTMSAGGGGPLGGNNQGADGVGNASGDWHCDSTWMGDRVVTKSTRTWVLPSYNNHQYREIKSGSVDGSNANAYFGYSTPWGYFDFNRFHSHWGPRDWQRLINNYWGFRPRSLRVKIFNIQVKEVTVQDSTTTIANNLTSTVQVFTDDDYQLPYVVGNGTEGCLPAFPPQVFTLPQYGYATLNRDNTENPTERSSFFCLEYFPSKMLRTGNNFEFTYNFEEVPFHSSFAPSQNLFKLANPLVDQYLYRFVSTNNTGGVQFNKNLAGRYANTYKNWFPGPMGRTQGWNLGSGVNRASVSALATTNRMELEGASYQVPPQPNGMTNNLQGSNTYALENTMIFNSQPANPGTTATYLEGNMLITSESETQPVNRVAYNVGGQMATNNQSSTTAPATGTYNLQEIVPGSVWMERDVYLQGPIWAKIPETGAHFHPSPAMGGFGLKHPPPMMLIKNTPVPGNITSFSDVPVSSFITQYSTGQVTVEMEWELKKENSKRWNPEIQYTNNYNDPQFVDFAPDSTGEYRTTRPIGTRYLTRPL

SEQ ID NO: 862 - protein, 723 aa, synthetic construct
  REGION 1..723: note = source = /note="Description of Artificial Sequence: Synthetic polypeptide"
MSFVDHPPDWLEEVGEGLREFLGLEAGPPKPKPNQQHQDQARGLVLPGYNYLGPGNGLDRGEPVNRADEVAREHDISYNEQLEAGDNPYLKYNHADAEFQEKLADDTSFGGNLGKAVFQAKKRVLEPFGLVEEGAKTAPTGKRIDDHFPKRKKARTEEDSKPSTSSDAEAGPSGSQQLQIPAQPASSLGADTMSAGGGGPLGDNNQGADGVGNASGDWHCDSTWMGDRVVTKSTRTWVLPSYNNHQYREIKSGSVDGSNANAYFGYSTPWGYFDFNRFHSHWSPRDWQRLINNYWGFRPRSLRVKIFNIQVKEVTVQDSTTTIANNLTSTVQVFTDDDYQLPYVVGNGTEGCLPAFPPQVFTLPQYGYATLNRDNTENPTERSSFFCLEYFPSKMLRTGNNFEFTYNFEEVPFHSSFAPSQNLFKLANPLVDQYLYRFVSTNNTGGVQFNKNLAGRYANTYKNWFPGPMGRTQGWNLGSGVNRASVSAFATTNRMELEGASYQVPPQPNGMTNNLQGSNTYALENTMIFNSQPANPGTTATYLEGNMLITSESETQPVNRVAYNVGGQMATNNQSSTTAPATGTYNLQEIVPGSVWMERDVYLQGPIAKIPETGAHFHPSPAMGGFGLKHPPPMMLIKNTPVPGNITSFSDVPVSSFITQYSTGQVTVEMEWELKKENSKRWNPEIQYTNNYNDPQFVDFAPDSTGECRTTRPIGTRYLTRPL

SEQ ID NO: 863 - protein, 724 aa, synthetic construct
  REGION 1..724: note = source = /note="Description of Artificial Sequence: Synthetic polypeptide"
MSFVDHPPDWLEEVGEGLREFLGLEAGPPKPKPNQQHQDQARGLVLPGYNYLGPGNGLDRGEPVNRADEVAREHDISYNEQLEAGDNPYLKYNHADAEFQEKLADDTSFGGNLGKAVFQAKKRVLEPFGLVEEGAKTAPTGKRIDDHFPKRKKARTEEDSKPSTSSDAEAGPSGSQQLQIPAQPASSLGADTMSAGGGGPLGDNNQGADGVGNASGDWHCDSTWMGDRVVTKSTRTWVLPSYNNHQYREIKSGSVDGSNANAYFGYSTPWGYFDFNRFHSHWSPRDWQRLINNYWGFRPRSLRVKILNIQVKEVTVQDSTTTIANNLTSTVQVFTDDDYQLPYVVGNGTEGCLPAFPPQVFTLPQYGYATLNRDNTENPTERSSFFCLEYFPSKMLRTGNNFEFTYNFEEVPFHSSFAPSQNLFKLANPLVGQYLYRFVSTNNTGGVQFNENLAGRYANTYKNWFPGPMGRTQGWNLGSGVNRASVSAFATTNRMELEGASYQVPPQPNGMTNNLQGSNTYALENTMIFNSQPANPGTTATYLEGNMLITSESETQPVNRVAYNVGGQMATNNQSSTTAPATGTYNLQEIVPGSVWMERDVYLQGPIWAKIPETGAHFHPSPAMGGFGLKHPPPMMLIKNTPVPGNITSFSDVPVSSFITQYSTGQATVEMEWELKKENSKRWNPEIQYTNNYNDPQFVDFAPDSTGEYRTTRPIGTRYLTRPL

SEQ ID NO: 864 - protein, 724 aa, synthetic construct
  REGION 1..724: note = source = /note="Description of Artificial Sequence: Synthetic polypeptide"
MSFVDHPPDWLEEVGEGLREFLGLEAGPPKPKPNQQHQDQARGLVLPGYNYLGPGNGLDRGEPVNRADEVAREHDISYNEQLEAGDNPYLKYNHADAEFQEKLADDTSFGGNLGKAVFQAKKRVLEPFGLVEEGAKTAPTGKRIDDHFPKRKKARTEEDSKPSTSSDAEAGPSGSQQLQIPAQPASSLGADTMSAGGGGPLGDNNQGADGVGNASGDWHCDSTWMGDRVVTKSTRTWVLPSYNNHQYREIKSGSVDGSNANAYFGYSTPWGYFDFNRFHSHWSPRDWQRLINNYWGFRPRSLRVKIFNIQVKEVTVQDSTTIIANNLTSTVQVFTDDDYQLPYVVGNGTEGCLPAFPPQVFTLPQYGYATLNRDNTENPTERSSFFCLEYFPSKMLRTGNNFEFTYNFEEVPFHSSFAPSQNLFKLANPLVDQYLYRFVSTNNTGGVQFNKNLAGRYANTYKNWFPGPMGRTQGWNLGSGVNRASVSAFATTNRMELEGASYQVPPQPNGMTNNLQGSNTYALENTMIFNSQPANPGTTATYLEGNMLITSESETQPVNRVAYNVGGQMATNNQSSTTAPATGTYNLQEIVPGSVWMERDVYLQGPIWAKIPETGAHFHPSPAMGGFGLKHPPPMMLIKNTPVPGNITSFSDVPVSSFITQYSTGQVTVEMEWELKKENSKRWNPEIQYTNNYNDPQFVDFAPDSTGEYRTTRPIGTRYLTRPL

SEQ ID NO: 865 - protein, 724 aa, synthetic construct
  REGION 1..724: note = source = /note="Description of Artificial Sequence: Synthetic polypeptide"
MSFVDHPPDWLEEVGEGLREFLGLEAGPPKPKPNQQHQDQARGLVLPGYNYLGPGNGLDRGEPVNRADEVAREHDISYNEQLEAGDNPYLKYNHADAEFQEKLADDTSFGGNLGKAVFQAKKRVLEPFGLVEEGAKTAPTGKRIDDHFPKRKKARTEEDSKPSTSSDAEAGPSGSQQLQIPAQPASSLGADTMSAGGGGPLGDNNQGADGVGNASGDWHCDSTWMGDRVVTKSTRTWVLPSYNNHQYREIKSGSVDGSNANAYFGYSTPWGYFDFNRFHSHWSPRDWQRLINNYWGFRPRSLRVKIFNIQVKEVTVQDSTTTIANNLTSTVQVFTDDDYQLPYVVGNGTEGCLPAFPPQVFTLPQYGYATLNRDNTENPTERSSFFCLEYFPSKMLRTGNNFEFTYNFEEVPFHSSFAPSQNLFKLANPLVDQYLYRFVSTNNTGGVQFNKNLAGRYANTYKNWFPGPMGRTQGWNLGSGVNRASVSAFATTNRMELEGASYQVPPQPNGMTNNLQGSNTYALENTMIFNSQPANPGTTATYLEGNMLITSESETQPVNRVAYNVGGQMATNNQSSTTAPATGTYNLQEIVPGSVWMERDVYLQGPIWAKIPETGAHFHPSPAMGGFGLKHPPPMMLIKNTPVPGNITSLSDVPVSSFITQYSTGQVTVEMEWELKKENSKRWNPEIQYTNNYNDPQFVDFAPDSTGEYRTTRPIGTRYLTRPL

SEQ ID NO: 866 - protein, 724 aa, synthetic construct
  REGION 1..724: note = source = /note="Description of Artificial Sequence: Synthetic polypeptide"
MSFVDHPPDWLEEVGEGLREFLGLEAGPPKPKPNQQHQDQARGLVLPGYNYLGPGNGLDRGEPANRADEVAREHDISYNEQLEAGDNPYLKYNHAGAEFQEKLADDTSFGGNLGKAVFQAKKRVLEPFGLVEEGAKTAPTGKRIDDHFPKRKKARTEEDSKPSTSSDAEAGPSGSQQLQIPAQPASSLGADTMSAGGGGPLGDNNQGADGVGNASGDWHCDSTWMGDRVVTKSTRTWVLPGYNNHQYREIKSGSVDGSNANAYFGYSTPWGYFDFNRFHSHWSPRDWQRLINNYWGFRPRSLRVKIFNIQVKEVTVQDSTTTIANNLTSTVQVFTDDDYQLPYVVGNGTEGCLPAFPPQVFTLPQYGYATLNRDNTENPTERSSFFCLEYFPSKMLRTGNNFEFTYNFEEVPFHSSFAPSQNLFKLANPLVDQYLYRFVSTNNTGGVQFNKNLAGRYANTYKNWFPGPMGRTQGWNLGSGVNRASVSAFATTNRMELEGASYQVPPQPNGMTNNLQGSNTYALENTMIFNSQPANPGTTATYLEGNMLITSESETQPVNRVAYNVGGQMATNNQSSTTAPATGTYNLQEIVPGSVWMERDVYLQGPIWAKIPETGAHFHPSPAMGGFGLKHPPPMMLIKNTPVPGNITSFSDVPVSSFITQYSTGQVTVEMEWELKKENSKRWNPEIQYTNNYNDPQFVDFAPDSTGEYRTTRPIGTRYLTRPL

SEQ ID NO: 867 - protein, 724 aa, synthetic construct
  REGION 1..724: note = source = /note="Description of Artificial Sequence: Synthetic polypeptide"
MSFVDHPPDWLEEVGEGLREFLGLEAGPPKPKPNQQHQDQARGLVLPGYNYLGPGNGLDRGEPVNRADEVAREHDISYNEQLEAGDNPYLKYNHADAEFQEKLADDTSFGGNLGKAVFQAKKRVLEPFGLVEEGAKTAPTGKRIDDHFPKRKKARTEEDSKPPTSSDAEAGPSGSQQLQIPAQPASSLGADTMSAGGGGPLGDNNQGADGVGNASGDWHCDSTWMGDRVVTKSTRTWVLPSYNNHQYREIKSGSVDGSNANAYFGYSTPWGYFDFNRFHSHWSPRDWQRLINNYWGFRPRSLRVKIFNIQVKEVTVQDSATTIANNLTSTVQVFTDDDYQLPYVVGNGTEGCLPAFPPQVFTLPQYGYATLNRDNTENPTERSSFFCLEYFPSKMLRTGNNFEFTYNFEEVPFHSSFAPSQNLFKLANPLVDQYLYRFVSTNNTGGVQFNKNLAGRYANTYKNWFPGPMGRTQGWNLGSGVNRASVSAFATTNRMELEGASYQVPPQPNGMTNNLQGSNTYALENTMIFNSQPANPGTTATYLEGNMLITSESETQPVNRVAYNVGGQMATNNQSSTTAPATGTYNLQEIVPGSVWMERDVYLQGPIWAKIPETGAHFHPSPAMGGFGLKHPPPMMLIKNTPVPGNITSFSDVPVSSFITQYSTGQVTVEMEWELKKENSKRWNPEIQYTNNYNDPQFVDFAPDSTGEYRTTRPIGTRYLTRPL

SEQ ID NO: 868 - protein, 724 aa, synthetic construct
  REGION 1..724: note = source = /note="Description of Artificial Sequence: Synthetic polypeptide"
MSFVDHPPDWLEEVGEGLREFLGLEAGPPKPKPNQQHQDQARGLVLPGYNYLGPGNGLDRGEPVNRADEVAREHDISYNEQLEAGDNPYLKYNHADAEFQEKLADDTSFGGNLGKAVFQAKKRVLEPFGLVEEGAKTAPTGKRIDDHFPKRKKARTEEDSKPSTSSDAEAGPSGSQQPQIPAQPASSLGADTMSAGGGGPLGDNNQGADGVGNASGDWHCDSTWMGDRVVTKSTRTWVLPSYNNHQYREIKSGSVDGSNANAYFGYSTPWGYFDFNRFHSHWSPRDWQRLINNYWGFRPRSLRVKIFNIQVKEVTVQDSTTTIANNLTSTVQVFTDDDYQLPYVVGNGTEGCLPAFPPQVFTLPQYGYATLNRDNTENPTERSSFFCLEYFPSKMLRTGNNFEFTYNFEEVPFHSSFAPSQNLFKLANPLVDQYLYRFVSTNNTGGVQFNKNLAGRYANTYKNWFPGPMGRTQGWNLGSGVNRASVSAFATTNRMELEGASYQVPPQPNGMTNNLQGSNTYALENTMIFNSQPANPGTTATYLEGNMLITSESETQPVNRVAYNVGGQMATNNQSSTTAPATGTYNLQEIVPGSVWMERDVYLQGPIWAKIPETGAHFHPSPAMGGFGLKHPPPMMLIKNTPAPGNITSFSDVPVSSFITQYSTGQVTVEMEWELKKENSKRWNPEIQYTNNYNDPQFVDFAPDSTGEYRTTRPIGTRYLTRPL

SEQ ID NO: 869 - protein, 724 aa, synthetic construct
  REGION 1..724: note = source = /note="Description of Artificial Sequence: Synthetic polypeptide"
MSFVDHPPDWLEEVGEGLREFLGLEAGPPKPKPNQQHQDQARGLVLPGYNYLGPGNGLDRGEPVNRADEVAREHDISYNEQLEAGDNPYLKYNHADAEFQEKLADDTSFGGNLGKAVFQAKKRVLEPFGLVEEGAKTAPTGKRIDDHFPKRKKARTEEDSKPPTSSDAEAGPSGSQQLQIPAQPASSLGADTMSAGGGGPLGDNNQGADGVGNASGDWHCDSTWMGDRVVTKSTRTWVLPSYNNHQYREIKSGSVDGSNANAYFGYSTPWGYFDFNRFHSHWSPRDWQRLINNYWGFRPRSLRVKIFNIQVKEVTVQDSTTTIANNLTSTVQVFTDDDYQLPYVVGNGTEGCLPAFPPQVFTLPQYGYATLNRDNTENPTERSSFFCLEYFPSKMLRTGNNFEFTYNFEEVPFHSSFAPSQNLFKLANPLVDQYLYRFVSTNNTGGVQFNKNLAGRYANTYKNWFPGPMGRTQGWNLGSGVNRASVSAFATTNRMELEGASYQVPPQPNGMTNNLQGSNTYALENTMIFNSQPANPGTTATYLEGNMLITSESETQPVNRVAYNVGGQMATNNQSSTTAPATGTYNLQEIVPGSVWMERDVYLQGPIWAKIPETGAHFHPSPAMGGFGLKHPPPMMLIKNTPVPGNITSFSDVPVSSFITQYSTGQVTVEMEWELKKENSKRWNPEIQYTNNYNDPQFVDFAPDSTGEYRTTRPIGTRYLTRPL

SEQ ID NO: 870 - protein, 724 aa, synthetic construct
  REGION 1..724: note = source = /note="Description of Artificial Sequence: Synthetic polypeptide"
MSFVDHPPDWLEEVGEGLREFLGLEAGPPKPKPNQQHQDQARGLVLPGYNYLGPGNGLDRGEPVNRADEVAREHDISYNEQLEAGDNPYLKYNHADAEFQEKLADDTSFGGNLGKAVFQAKKRVLEPFGLVEEGAKTAPTGKRIDDHFPKRKKARTEEDSKPPTSSDAEAGPSGSQQLQIPAQPASSLGADTMSAGGGGPLGDNNQGADGVGNASGDWHCDSTWMGDRVVTKSTRTWVPPSYNNHQYREIKSGSVDGSNANAYFGYSTPWGYFDFNRFHSHWSPRDWQRLINNYWGFRPRSLRVKIFNIQVKEVTVQDSTTTIANNLTSTVQVFTDDDYQLPYVVGNGTEGCLPAFPPQVFTLPQYGYATLNRDNTENPTERSSFFCLEYFPSKMLRTGNNFEFTYNFEEVPFHSSFAPSQNLFKLANPLVDQYLYRFVSTNNTGGVQFNKNLAGRYANTYKNWFPGPMGRTQGWNLGSGVNRASVSAFATTNRMELEGASYQVPPQPNGMTNNLQGSNTYALENTMIFNSQPANPGTTATYLEGNMLITSESETQPVNRVAYNVGGQMATNNQSSTTAPATGTYNLQEIVPGSVWMERDVYLQGPIWAKIPETGAHFHPSPAMGGFGLKHPPPMMLIKNTPVPGNITSFSDVPVSSFITQYSTGQVAVEMEWELKKENSKRWNPEIQYTNNYNDPQFVDFAPDSTGEYRTTRPIGTRYLTRPL

SEQ ID NO: 871 - protein, 724 aa, synthetic construct
  REGION 1..724: note = source = /note="Description of Artificial Sequence: Synthetic polypeptide"
MSFVDHPPDWLEEVGEGLREFLGLEAGPPKPKPNQQHQDQARGLVLPGYNYLGPGNGLDRGEPVNRADEVAREHDISYNEQLEAGDNPYLKYNHADAEFQEKLADDTSFGGNLGKAVFQAKKRVLEPFGLVEEGAKTAPTGKRIDDHFPKRKKARTEEDSKPSTSSDAEAGPSGSQQLQIPAQPASSLGADTMSAGGGGPLGDNNQGADGVGNASGDWHCDSTWMGDRVVTKSTRTWVLPSYNNHQYREIKSGSVDGSNANAYFGYSTPWGYFDFNRFHSHWSPRDWQRLINNYWGFRPRSLRVKIFNIQVKEVTVQDSTTTIANNLTSTVQVFTDDDYQLPYVVGNGTEGCLPAFPPQVFTLPQYGYATLNRDNTENPTERSSFFCLEYFPSKMLRTGNNFEFTYNFEEVPFHSSFAPSQNLFKLANPLVDQYLYRFVSTNNTGGVQFNKNLAGRYANTYKNWFPGPMGRTQGWNLGSGVNRASVSAFATTNRMELEGASYQVPPQPNGMTNNLQGSNTYALENTMIFNSQPANPGTTATYLEGNMLITSESETQPVNRVAYNVGGQMATNNQSSTTAPATGTYNLQEIVPGSVWMERDVYLQGPIWAKIPETGAHFHPSPAMGGFGLKHPPPMMLIKNTPAPGNITSFSDVPVSSFITQYSTGQVTVEMEWELKKENSKRWNPEIQYTNNYNDPQFVDFAPDSTGEYRTTRPIGTRYLTRPL

SEQ ID NO: 872 - protein, 724 aa, synthetic construct
  REGION 1..724: note = source = /note="Description of Artificial Sequence: Synthetic polypeptide"
MSFVDHPPDWLEEVGEGLREFLGLEAGPPKPKPNQQHQDQARGLVLPGYNYLGPGNGLDRGEPVNRADEVAREHDISYNEQLEAGDNPYLKYNHADAEFQEKLADDTSFGGNLGKAVFQAKKRVLEPFGLAEEGAKTAPTGKRIDDHFPKRKKARTEEDSKPSTSSDAEAGPSGSQQLQIPAQPASSLGADTMSAGGGGPLGDNNQGADGVGNASGDWHCDSTWMGDRVVTKSTRTWVLPSYNNHQYREIKSGSVDGSNANAYFGYSTPWGYFDFNRFHSHWSPRDWQRLINNYWGFRPRSLRAKIFNIQVKEVTVQDSTTTIANNLTSTVQVFTDDDYQLPYVVGNGTEGCLPAFPPQVFTLPQYGYATLNRDNTENPTERSSFFCLEYFPSKMLRTGNNLEFTYNFEEVPFHSSFAPSQNLFKLANPLVDQYLYRFVSTNNTGGVQFNKNLAGRYANTYKNWFPGPMGRTQGWNLGSGVNRASVSAFATTNRMELEGASYQVPPQPNGMTNNLQGSNTYALENTMIFNSQPANPGTTATYLEGNMLITSESETQPVNRVVHNVGGQMATNNQSSTTAPATGTYNLQEIVPGSVWMERDVYLQGPIWAKIPETGAHFHPSPAMGGFGLKHPPPMMLIKNTPVPGNITSFSDVPVSSFITQYSTGQVTVEMEWELKKENSKRWNPEIQYTNNYNDPQFVDFAPDSTGEYRTTRPIGTRYLTRPL

SEQ ID NO: 873 - protein, 724 aa, synthetic construct
  REGION 1..724: note = source = /note="Description of Artificial Sequence: Synthetic polypeptide"
MSFVDHPPDWLEEVGEGLREFLGLEAGPPKPKPNQQHQDQARGLVLPGYNYLGPGNGLDRGEPVNRADEVAREHDISYNEQLEAGDNPYLKYNHADAEFQEKLADDTSFGGNLGKAVFQAKKRVLEPFGLVEEGAKTAPTGKRIDDHFPKRKKARTEEDSKPSTSSDAEAGPSGSQQLQIPAQPASSLGADTMSAGGGGPLGDNNQGADGVGNASGDWHCDSTWMGDRVVTKSTRTWVLPSYNNHQYREIKSGSVDGGNANAYFGYSTPWGYFDFNRFHSHWSPRDWQRLINNYWGFRPRSLRVKIFNIQVKEVTVQDSTTTIANNLTSTVQVFTDDDYQLPYVVGNGTEGCLPAFPPQVFTLPQYGYATLNRDNTENPTERSSFFCLEYFPSKMLRTGNNFEFTYNFEEVPFHSSFAPSQNLFKLANPLVDQYLYRFVSTNNTGGVQFNKNLAGRYANTYKNWFPGPMGRTQGWNLGSGVNRASVSAFATTNRMELEGASYQVPPQPNGMTNNLQGSNTYALENTMIFNSQPANPGTTATYLEGNMLITSESETQPVNRVAYNVGGQMATNNQSSTTAPATGTYNLQEIVPGSVWMERDVYLQGPIWAKIPETGAHFHPSPAMGGFGLKHPPPMMLIKNTPAPGNITSFSDVPVSSFITQYSTGQVTVEMEWELKKGNSKRWNPEIQYTNNYNDPQFVDFAPDSTGEYRTTRPIGTRYLTRPL

SEQ ID NO: 874 - protein, 724 aa, synthetic construct
  REGION 1..724: note = source = /note="Description of Artificial Sequence: Synthetic polypeptide"
MSFVDHPPDWLEEVGEGLREFLGLEAGPPKPKPNQQHQDQARGLVLPGYNYLGPGNGLDRGEPVNRADEVAREHDISYNEQLEAGDNPYLKYNHADAEFQEKLADDTSFGGNLGKAVFQAKKRVLEPFGLVEEGAKTAPTGKRIDDHFPKRKKARTEEDSKPSTSSDAEAGPSGSQQLQIPAQPASSLGADTMSAGGGGPLGDNNQGADGVGNASGDWHCDSTWMGDRVVTKSTRTWVLPSYNNHQYREIKSGSVDGSNANAYFGYSTPWGYFDFNRFHSHWSPRDWQRLINNYWGFRPRSLRVKIFNIQVKEVTVQDSTTTIANNLTSTVQVFTDDDYQLPYVVGNGTEGCLPAFPPQVFTLPQYGYATLNRDNTENPTERSSFFCLEYFPSKMLRTGNNFEFTYNFEEVPFHSSFAPSQNLFKLANPLVDQYLYRFVSTNNTGGVQFNKNLAGRYANTYKNWFPGPMGRTQGWNLGSGVNRASVSAFATTNRMELEGASYQVPPQPNGMTNNLQGSNTYALENTMIFNSQPANPGTTATYLEGNMLITSESETQPVNRVAYNVGGQMATNNQSSTTAPATGTYNLQEIVPGSVWMERDVYLQGPIWAKIPETGVHFHPSPAMGGFGLKHPPPMMLIKNTPVPGNITSFSDVPVSSFITQYSTGQVTVEMEWELKKENSKRWNPEIQYTNNYNDPQFVDFAPDSTGEYRTTRPIGTRYLTRPL

SEQ ID NO: 875 - protein, 724 aa, synthetic construct
  VARIANT 551: note = MOD_RES - Any naturally occurring amino acid
  REGION 1..724: note = source = /note="Description of Artificial Sequence: Synthetic polypeptide"
MSFVDHPPDWLEEVGEGLREFLGLEAGPPKPKPNQQHQDQARGLVLPGYNYLGPGNGLDRGEPVNRADEVAREHDISYNEQLEAGDNPYLKYNHADAEFQEKLADDTSFGGNLGKAVFQAKKRVLEPFGLVEEGAKTAPTGKRIDDHFPKRKKARTEEDSKPSTSSDAEAGPSGSQQLQIPAQPASSLGADTMSAGGGGPLGDNNQGADGVGNASGDWHCDSTWMGDRVVTKSTRTWVLPSYNNHQYREIKSGSVDGSNANAYFGYSTPWGYFDFNRFHSHWSPRDWQRLINNYWGFRPRSLRVKIFNIQVKEVTVQDSTTTIANNLTSTVQVFTDDDYQLPYVVGNGTEGCLPAFPPQVFTLPQYGYATLNRDNTENPTERSSFFCLEYFPSKMLRTGNNFEFTYNFEEVPFHSSFAPSQNLFKLANPLVDQYLYRFVSTNNTGGVQFNKNLAGRYANTYKNWFPGPMGRTQGWNLGSGVNRASVSAFATTNRMELEGASYQVPPQPNGMTNNLQGSNTYALENTMIFNSQPANPGTTATYLEGSMLITXESETQPVNRVAYNVGGQMATNNQSSTTAPATGTYNLQEIVPGSVWMERDVYLQGPIWAKIPETGAHFHPSPAMGGFGLKHPPPMMLIKNTPVPGNITSFSDVPVSSFITQYSTGQVTVEMEWELKKENSKRWNPEIQYTNNYNDPQFVDFAPDSTGEYRTTRPIGTRYLTRPL

SEQ ID NO: 876 - protein, 736 aa, synthetic construct; identical to SEQ ID NO: 50
  REGION 1..736: note = source = /note="Description of Artificial Sequence: Synthetic polypeptide"

SEQ ID NO: 877 - protein, 734 aa, synthetic construct; identical to SEQ ID NO: 68
  REGION 1..734: note = source = /note="Description of Artificial Sequence: Synthetic polypeptide"

SEQ ID NO: 878 - protein, 723 aa, synthetic construct
  REGION 1..723: note = source = /note="Description of Artificial Sequence: Synthetic polypeptide"
MSFVDHPPDWLEEVGEGLREFLGLEAGPPKPKPNQQHQDQARGLVLPGYNYLGPGNGLDRGEPVNRADEVAREHDISYNEQLEAGDNPYLKYNHADAEFQEKLADDTSFGGNLGKAVFQAKKRVLEPFGLVEEGAKTAPTGKRIDDHFPKRKKARTEEDSKPSTSSDAEAGPSGSQQLQIPAQPASSLGADTMSAGGGPLGDNNQGADGVGNASGDWHCDSTWMGDRVVTKSTRTWVLPSYNNHQYREIKSGSVDGSNANAYFGYSTPWGYFDFNRFHSHWSPRDWQRLINNYWGFRPRSLRVKIFNIQVKEVTVQDSTTTIANNLTSTVQVFTDDDYQLPYVVGNGTEGCLPAFPPQVFTLPQYGYATLNRDNTENPTERSSFFCLEYFPSKMLRTGNNFEFTYNFEEVPFHSSFAPSQNLFKLANPLVDQYLYRFVSTNNTGGVQFNKNLAGRYANTYKNWFPGPMGRTQGWNLGSGVNRASVSAFATTNRMELEGASYQVPPQPNGMTNNLQGSNTYALENTMIFNSQPANPGTTATYLEGNMLITSESETQPVNRVAYNVGGQMATNNQSSTTAPATGTYNLQEIVPGSVWMERDVYLQGPIWAKIPETGAHFHPSPAMGGFGLKHPPPMMLIKNTPVPGNITSFSDVPVSSFITQYSTGQVTVEMEWELKKENSKRWNPEIQYTNNYNDPQFVDFAPDSTGEYRTTRPIGTRYLTRPL

SEQ ID NO: 879 - protein, 534 aa, synthetic construct
  REGION 1..534: note = source = /note="Description of Artificial Sequence: Synthetic polypeptide"
MAEGGGGAMGDSSGGADGVGNASGNWHCDSQWMGNTVITKTTRTWVLPSYNNHIYKAITSGTSQDANVQYAGYSTPWGYFDFNRFHCHFSPRDWQRLINNHWGIRPKSLKFKIFNVQVKEVTTQDQTKTIANNLTSTIQVFTDDEHQLPYVLGSATEGTMPPFPSDVYALPQYGYCTMHTNQNGARFNDRSAFYCLEYFPSQMLRTGNNFEFTFDFEEVPFHSMFAHSQDLDRLMNPLVDQYLWNFNEVDSSRNAQFKKAVKGAYGTMGRNWLPGPKFLDQRVRAYTGGTDNYANWNIWSNGNKVNLKDRQYLLQPGPVSATYTEGEASSLPAQNILGIAKDPYRSGSTTAGISDIMVTEEQEVAPTNGVGWKPYGRTVTNEQNTTTAPTSSDLDVLGALPGMVWQNRDIYLQGPIGAKIPKTDGKFHPSPNLGGFGLHNPPPQVFIKNTPVPADPPVEYVHQKWNSYITQYSTGQCTVEMVWELRKENSKRWNPEIQFTSNFSNRTSIMFAPNETGGYVEDRLIGTRYLTQNL

SEQ ID NO: 880 - protein, 554 aa, synthetic construct
  REGION 1..554: note = source = /note="Description of Artificial Sequence: Synthetic polypeptide"
MTSVNSAEASTGAGGGGSNPVKSMWSEGATFSANSVTCTFSRQFLIPYDPEHHYKVFSPAASSCHNASGKEAKVCTISPIMGYSTPWRYLDFNALNLFFSPLEFQHLIENYGSIAPDALTVTISEIAVKDVTDKTGGGVQVTDSTTGRLCMLVDHEYKYPYVLGQGQDTLAPELPIWVYFPPQYAYLTVGDVNTQGISGDSKKLASEESAFYVLEHSSFQLLGTGGTATMSYKFPPVPPENLEGCSQHFYEMYNPLYGSRLGVPDTLGGDPKFRSLTHEDHAIQPQNFMPGPLVNSVSTKEGDSFNTGAGKALTGLSTGTSQNTRISLRPGPVSQPYHHWDTDKYVTGINAISHGQTTYGNAEDKEYQQGVGRFPNEKEQLKQLQGLNMHTYFPNKGTQQYTDQIERPLMVGSVWNRRALHYESQLWSKIPNLDDSFKTQFAALGGWGLHQPPPQIFLKILPQSGPIGGIKSMGITTLVQYAVGIMTVTMTFKLGPRKATGRWNPQPGVYPPHAAGHLPYVLYDPTATDAKQHHRHGYEKPEELWTAKSRVHPL

SEQ ID NO: 881 - protein, 587 aa, synthetic construct
  REGION 1..587: note = source = /note="Description of Artificial Sequence: Synthetic polypeptide"
MSDGTSQPDGGNAVHSAARVERAADGPGGSGGGGSGGGGVGVSTGSYDNQTHYRFLGDGWVEITALATRLVHLNMPKSENYCRIRVHNTTDTSVKGNMAKDDAHEQIWTPWSLVDANAWGVWLQPSDWQYICNTMSQLNLVSLDQEIFNVVLKTVTEQDSGGQAIKIYNNDLTACMMVAVDSNNILPYTPAANSMETLGFYPWKPTIASPYRYYFCVDRDLSVTYENQEGTIEHNVMGTPKGMNSQFFTIENTQQITLLRTGDEFATGTYYFDTNPVKLTHTWQTNRQLGQPPLLSTFPEADTDAGTLTAQGSRHGATQMEVNWVSEAIRTRPAQVGFCQPHNDFEASRAGPFAAPKVPADVTQGMDREANGSVRYSYGKQHGENWAAHGPAPERYTWDETNFGSGRDTRDGFIQSAPLVVPPPLNGILTNANPIGTKNDIHFSNVFNSYGPLTTFSHPSPVYPQGQIWDKELDLEHKPRLHITAPFVCKNNAPGQMLVRLGPNLTDQYDPNGATLSRIVTYGTFFWKGKLTMRAKLRANTTWNPVYQVSVEDNGNSYMSVTKWLPTATGNMQSVPLITRPVARNTY

SEQ ID NO: 882 - protein, 584 aa, synthetic construct
  REGION 1..584: note = source = /note="Description of Artificial Sequence: Synthetic polypeptide"
MSDGAVQPDGGQPAVRNERATGSGNGSGGGGGGGSGGVGISTGTFNNQTEFKFLENGWVEITANSSRLVHLNMPESENYKRVVVNNMDKTAVKGNMALDDIHVEIVTPWSLVDANAWGVWFNPGDWQLIVNTMSELHLVSFEQEIFNVVLKTVSESATQPPTKVYNNDLTASLMVALDSNNTMPFTPAAMRSETLGFYPWKPTIPTPWRYYFQWDRTLIPSHTGTSGTPTNVYHGTDPDDVQFYTIENSVPVHLLRTGDEFATGTFFFDCKPCRLTHTWQTNRALGLPPFLNSLPQSEGATNFGDIGVQQDKRRGVTQMGNTDYITEATIMRPAEVGYSAPYYSFEASTQGPFKTPIAAGRGGAQTDENQAADGDPRYAFGRQHGQKTTTTGETPERFTYIAHQDTGRYPEGDWIQNINFNLPVTNDNVLLPTDPIGGKTGINYTNIFNTYGPLTALNNVPPVYPNGQIWDKEFDTDLKPRLHINAPFVCQNNCPGQLFVKVAPNLTNQYDPDASANMSRIVTYSDFWWKGKLVFKAKLRASHTWNPIQQMSINVDNQFNYVPNNIGAMKIVYEKSQLAPRKLY

SEQ ID NO: 883 - protein, 548 aa, synthetic construct
  REGION 1..548: note = source = /note="Description of Artificial Sequence: Synthetic polypeptide"
GVGISTGTFNNQTEFKFLENGWVEITANSSRLVHLNMPESENYRRVVVNNMDKTAVNGNMALDDIHAQIVTPWSLVDANAWGVWFNPGDWQLIVNTMSELHLVSFEQEIFNVVLKTVSESATQPPTKVYNNDLTASLMVALDSNNTMPFTPAAMRSETLGFYPWKPTIPTPWRYYFQWDRTLIPSHTGTSGTPTNIYHGTDPDDVQFYTIENSVPVHLLRTGDEFATGTFFFDCKPCRLTHTWQTNRALGLPPFLNSLPQSEGATNFGDIGVQQDKRRGVTQMGNTNYITEATIMRPAEVGYSAPYYSFEASTQGPFKTPIAAGRGGAQTDENQAADGNPRYAFGRQHGQKTTTTGETPERFTYIAHQDTGRYPEGDWIQNINFNLPVTNDNVLLPTDPIGGKTGINYTNIFNTYGPLTALNNVPPVYPNGQIWDKEFDTDLKPRLHVNAPFVCQNNCPGQLFVKVAPNLTNEYDPDASANMSRIVTYSDFWWKGKLVFKAKLRASHTWNPIQQMSINVDNQFNYVPSNIGGMKIVYEKSQLAPRKLY

SEQ ID NO: 884 - protein, 736 aa, synthetic construct; identical to SEQ ID NO: 112
  REGION 1..736: note = source = /note="Description of Artificial Sequence: Synthetic polypeptide"

SEQ ID NO: 885 - protein, 736 aa, synthetic construct; identical to SEQ ID NO: 107
  REGION 1..736: note = source = /note="Description of Artificial Sequence: Synthetic polypeptide"

SEQ ID NO: 886 - protein, 736 aa, synthetic construct
  REGION 1..736: note = source = /note="Description of Artificial Sequence: Synthetic polypeptide"
MAADGYLPDWLEDTLSEGIRQWWKLKPGPPPPKPAERHKDDSRGLVLPGYKYLGPFNGLDKGEPVNEADAAALEHDKAYDRQLDSGDNPYLKYNHADAEFQERLKEDTSFGGNLGRAVFQAKKRVLEPLGLVEEPVKTAPGKKRPVEHSPVEEPDSSSGTGKAGQQPARKRLNFGQTGDADSVPDPQPLGQPPAAPSGLGTNTMATGSGAPMADNNEGADGVGNSSGNWHCDSTWMGDRVITTSTRTWALPTYNNHLYKQISSQSGASNDNHYFGYSTPWGYFDFNRFHCHFSPRDWQRLINNNWGFRPKRLNFKLFNIQVKEVTQNDGTTTIANNLTSTVQVFTDSEYQLPYVLGSAHQGCLPPFPADVFMVPQYGYLTLNNGSQAVGRSSFYCLEYFPSQMLRTGNNFTFSYTFEDVPFHSSYAHSQSLDRLMNPLIDQYLYYLSRTNTPSGTTTQSRLQFSQAGASDIRDQSRNWLPGPCYRQQRVSKTSADNNNSEYSWTGATKYHLNGRDSLVNPGPAMASHKDDEEKFFPQSGVLIFGKQGSEKTNVDIEKVMITDEEEIRTTNPVATEQYGSVSTNLQRGNRQAATADVNTQGVLPGMVWQDRDVYLQGPIWAKIPHTDGHFHPSPLMGGFGLKHPPPQILIKNTPVPANPSTTFSAAKFASFITQYSTGQVSVEIEWELQKENSKRWNPEIQYTSNYNKSVNVDFTVDTNGVYSEPRPIGTRYLTRNL

SEQ ID NO: 887 - protein, 736 aa, synthetic construct
  REGION 1..736: note = source = /note="Description of Artificial Sequence: Synthetic polypeptide"
MAADGYLPDWLEDNLSEGIREWWDLKPGAPKPKANQQKQDDGRGLVLPGYKYLGPFNGLDKGEPVNAADAAALEHDKAYDQQLKAGDNPYLRYNHADAEFQERLQEDTSFGGNLGRAVFQAKKRVLEPFGLVEEGAKTAPGKKRPVEQSPQEPDSSSGIGKTGQQPAKKRLNFGQTGDSESVPDPQPLGEPPATPAAVGPTTMASGGGAPMADNNEGADGVGNASGNWHCDSTWLGDRVITTSTRTWALPTYNNHLYKQISSASTGASNDNHYFGYSTPWGYFDFNRFHCHFSPRDWQRLINNNWGFRPKRLNFKLFNVQVKEVTTNDGVTTIANNLTSTVQVFSDSEYQLPYVLGSAHQGCLPPFPADVFMIPQYGYLTLNNGSQAVGRSSFYCLEYFPSQMLRTGNNFTFSYTFEDVPFHSSYAHSQSLDRLMNPLIDQYLYYLNRTQDQSGSAQNKDLLFSRGSPAGMSVQPKNWLPGPCYRQQRVSKTKTDNNNSNFTWTGASKYNLNGRESIINPGTAMASHKDDKNKFFPMSGVMIFGKESAGASNTALDNVMITDEEEIKATNPVATERFGTVAVNLQSSSTDPATGDVHVMGALPGMVWQDRDVYLQGPIWAKIPHTDGHFHPSPLMGGFGLKNPPPQILIKNTPVPANPPAEFSATKFASFITQYSTGQVSVEIEWELQKENSKRWNPEVQYTSNYAKSANVDFTVDNNGLYTEPRPIGTRYLTRPL

SEQ ID NO: 888 - protein, 737 aa, synthetic construct
  REGION 1..737: note = source = /note="Description of Artificial Sequence: Synthetic polypeptide"
MAADGYLPDWLEDTLSEGIRQWWKLKPGPPPPKPAERHKDDSRGLVLPGYKYLGPGNGLDKGEPVNAADAAALEHDKAYDQQLKAGDNPYLKYNHADAEFQERLKEDTSFGGNLGRAVFQAKKRVLEPLGLVEEGAKTAPGKKRPVEPSPQRSPDSSTGIGKKGQQPARKRLNFGQTGDSESVPDPQPLGEPPATPAAVGPTTMASGGGAPMADNNEGADGVGNASGNWHCDSTWLGDRVITTSTRTWALPTYNNHLYKQISSASTGASNDNHYFGYSTPWGYFDFNRFHCHFSPRDWQRLINNNWGFRPKRLNFKLFNIQVKEVTTNDGVTTIANNLTSTVQVFSDSEYQLPYVLGSAHQGCLPPFPADVFMIPQYGYLTLNNGSQAVGRSSFYCLEYFPSQMLRTGNNFTFSYTFEDVPFHSSYAHSQSLDRLMNPLIDQYLYYLNRTQNQSGSAQNKDLLFSRGSPAGMSVQPKNWLPGPCYRQQRVSKTKTDNNNSNFTWTGASKYNLNGRESIINPGTAMASHKDDKDKFFPMSGVMIFGKESAGASNTALDNVMITDEEEIKATNPVATERFGTVAVNLQSSSTDPATEDVHVMGALPGMVWQDRDVYLQGPIWAKIPHTDGHFHPSPLMGGFGLKNPPPQILIKNTPVPANPPAEFSATKFASFITQYSTGQVSVEIEWELQKENSKRWNPEVQYTSNYAKSANVDFTVDNNGLYTEPRPIGTRYLTRNL

SEQ ID NO: 889 - protein, 736 aa, synthetic construct
  REGION 1..736: note = source = /note="Description of Artificial Sequence: Synthetic polypeptide"
MAADGYLPDWLEDNLSEGIREWWDLKPGAPKPKANQQKQDDGRGLVLPGYKYLGPFNGLDKGEPVNAADAAALEHDKAYDQQLKAGDNPYLRYNHADAEFQERLQEDTSFGGNLGRAVFQAKKRVLEPFGLVEEGAKTAPGKKRPVEQSPQEPDSSSGIGKTGQQPAKKRLNFGQTGDSESVPDPQPLGEPPATPAAVGPTTMASGGGAPMADNNEGADGVGNASGNWHCDSTWLGDRVITTSTRTWALPTYNNHLYKQISSASTGASNDNHYFGYSTPWGYFDFNRFHCHFSPRDWQRLINNNWGFRPKRLNFKLFNVQVKEVTTNDGVTTIANNLTSTVQVFSDSEYQLPYVLGSAHQGCLPPFPADVFMIPQYGYLTLNNGSQAVGRSSFYCLEYFPSQMLRTGNNFTFSYTFEDVPFHSSYAHSQSLDRLMNPLIDQYLYYLNRTQDQSGSAQNKDLLFSRGSPAGMSVQPKNWLPGPCYRQQRVSKTKTDNNNSNFTWTGASKYNLNGRESIINPGTAMASHKDDKNKFFPMSGVMIFGKESAGASNTALDNVMITDEEEIKATNPVATERFGTVAVNLQSSSTDPATGDVHVMGALPGMVWQDRDVYLQGPIWAKIPHTDGHFHPSPLMGGFGLKHPPPQILIKNTPVPANPPAEFSATKFASFITQYSTGQVSVEIEWELQKENSKRWNPEVQYTSNYAKSANVDFTVDNNGLYTEPRPIGTRYLTRPL

SEQ ID NO: 890 - protein, 736 aa, synthetic construct
  REGION 1..736: note = source = /note="Description of Artificial Sequence: Synthetic polypeptide"
MAADGYLPDWLEDNLSEGIREWWDLKPGAPKPKANQQKQDDGRGLVLPGYKYLGPFNGLDKGEPVNAADAAALEHDKAYDQQLKAGDNPYLRYNHADAEFQERLQEDTSFGGNLGRAVFQAKKRVLEPFGLVEEGAKTAPGKKRPVEQSPQEPDSSSGIGKTGQQPAKKRLNFGQTGDSESVPDPQPLGEPPATPAAVGPTTMASGGGAPMADNNEGADGVGNASGNWHCDSTWLGDRVITTSTRTWALPTYNNHLYKQISSASTGASNDNHYFGYSTPWGYFDFNRFHCHFSPRDWQRLINNNWGFRPKRLNFKLFNVQVKEVTTNDGVTTIANNLTSTVQVFSDSEYQLPYVLGSAHQGCLPPFPADVFMIPQYGYLTLNNGSQAVGRSSFYCLEYFPSQMLRTGNNFTFSYTFEDVPFHSSYAHSQSLDRLMNPLIDQYLYYLNRTQDQSGSAQNKDLLFSRGSPAGMSVQPKNWLPGPCYRQQRVSKTKTDNNNSNFTWTGASKYNLNGRESIINPGTAMASHKDDKDKFFPMSGVMIFGKESAGASNTALDNVMITDEEEIKATNPVATERFGTVAVNLQSSSTDPATGDVHVMGALPGMVWQDRDVYLQGPIWAKIPHTDGHFHPSPLMGGFGLKHPPPQILIKNTPVPANPPAEFSATKFASFITQYSTGQVSVEIEWELQKENSKRWNPEVQYTSNYAKSANVDFTVDNNGLYTEPRPIGTRYLTRPL

SEQ ID NO: 891 - protein, 736 aa, synthetic construct
  REGION 1..736: note = source = /note="Description of Artificial Sequence: Synthetic polypeptide"
MAADGYLPDWLEDNLSEGIREWWDLKPGAPKPKANQQKQDDGRGLVLPGYKYLGPFNGLDKGEPVNAADAAALEHDKAYDQQLKAGDNPYLRYNHADAEFQERLQEDTSFGGNLGRAVFQAKKRVLEPFGLVEEGAKTAPGKKRPVEQSPQEPDSSSGIGKTGQQPAKKRLNFGQTGDSESVPDPQPLGEPPATPAAVGPTTMASGGGAPMADNNEGADGVGNASGNWHCDSTWLGDRVITTSTRTWALPTYNNHLYKQISSASTGASNDNHYFGYSTPWGYFDFNRFHCHFSPRDWQRLINNNWGFRPKRLNFKLFNIQVKEVTTNDGVTTIANNLTSTVQVFSDSEYQLPYVLGSAHQGCLPPFPADVFMIPQYGYLTLNNGSQAVGRSSFYCLEYFPSQMLRTGNNFTFSYTFEDVPFHSSYAHSQSLDRLMNPLIDQYLYYLNRTQDQSGSAQNKDLLFSRGSPAGMSVQPKNWLPGPCYRQQRVSKTKTDNNNSNFTWTGASKYNLNGRESIINPGTAMASHKDDKNKFFPMSGVMIFGKESAGASNTALDNVMITDEEEIKATNPVATERFGTVAVNLQSSSTDPATGDVHVMGALPGMVWQDRDVYLQGPIWAKIPHTDGHFHPSPLMGGFGLKHPPPQILIKNTPVPANPPAEFSATKFASFITQYSTGQVSVEIEWELQKENSKRWNPEVQYTSNYAKSANVDFTVDNNGLYTEPRPIGTRYLTRPL

SEQ ID NO: 892 - protein, 736 aa, synthetic construct
  REGION 1..736: note = source = /note="Description of Artificial Sequence: Synthetic polypeptide"
MAADGYLPDWLEDNLSEGIREWWDLKPGAPKPKANQQKQDDGRGLVLPGYKYLGPFNGLDKGEPVNAADAAALEHDKAYDQQLKAGDNPYLRYNHADAEFQERLQEDTSFGGNLGRAVFQAKKRVLEPFGLVEEGAKTAPGKKRPVEQSPQEPDSSSGIGKTGQQPAKKRLNFGQTGDSESVPDPQPLGEPPATPAAVGPTTMASGGGAPMADNNEGADGVGNASGNWHCDSTWLGDRVITTSTRTWALPTYNNHLYKQISSASTGASNDNHYFGYSTPWGYFDFNRFHCHFSPRDWQRLINNNWGFRPKRLNFKLFNVQVKEVTTNDGVTTIANNLTSTVQVFSDSEYQLPYVLGSAHQGCLPPFPADVFMIPQYGYLTLNNGSQAVGRSSFYCLEYFPSQMLRTGNNFTFSYTFEDVPFHSSYAHSQSLDRLMNPLIDQYLYYLNRTQNQSGSAQNKDLLFSRGSPAGMSVQPKNWLPGPCYRQQRVSKTKTDNNNSNFTWTGASKYNLNGRESIINPGTAMASHKDDKDKFFPMSGVMIFGKESAGASNTALDNVMITDEEEIKATNPVATERFGTVAVNLQSSSTDPATGDVHVMGALPGMVWQDRDVYLQGPIWAKIPHTDGHFHPSPLMGGFGLKHPPPQILIKNTPVPANPPAEFSATKFASFITQYSTGQVSVEIEWELQKENSKRWNPEVQYTSNYAKSANVDFTVDNNGLYTEPRPIGTRYLTRPL

SEQ ID NO: 893 - protein, 736 aa, synthetic construct
  REGION 1..736: note = source = /note="Description of Artificial Sequence: Synthetic polypeptide"
MAADGYLPDWLEDNLSEGIREWWDLKPGAPKPKANQQKQDDGRGLVLPGYKYLGPFNGLDKGEPVNAADAAALEHDKAYDQQLKAGDNPYLRYNHADAEFQERLQEDTSFGGNLGRAVFQAKKRVLEPFGLVEEGAKTAPGKKRPVEQSPQEPDSSSGIGKTGQQPAKKRLNFGQTGDSESVPDPQPLGEPPATPAAVGPTTMASGGGAPMADNNEGADGVGNASGNWHCDSTWLGDRVITTSTRTWALPTYNNHLYKQISSASTGASNDNHYFGYSTPWGYFDFNRFHCHFSPRDWQRLINNNWGFRPKRLNFKLFNVQVKEVTTNDGVTTIANNLTSTVQVFSDSEYQLPYVLGSAHQGCLPPFPADVFMIPQYGYLTLNNGSQAVGRSSFYCLEYFPSQMLRTGNNFTFSYTFEDVPFHSSYAHSQSLDRLMNPLIDQYLYYLNRTQNQSGSAQNKDLLFSRGSPAGMSVQPKNWLPGPCYRQQRVSKTKTDNNNSNFTWTGASKYNLNGRESIINPGTAMASHKDDKNKFFPMSGVMIFGKESAGASNTALDNVMITDEEEIKATNPVATERFGTVAVNLQSSSTDPATGDVHVMGALPGMVWQDRDVYLQGPIWAKIPHTDGHFHPSPLMGGFGLKHPPPQILIKNTPVPANPPAEFSATKFASFITQYSTGQVSVEIEWELQKENSKRWNPEVQYTSNYAKSANVDFTVDNNGLYTEPRPIGTRYLTRPL

SEQ ID NO: 894 - DNA, 2217 bp, synthetic construct
  misc_feature 1..2217: note = source = /note="Description of Artificial Sequence: Synthetic polynucleotide"
  source 1..2217: mol_type = other DNA
atggctgccgatggttatcttccagattggctcgaggacaacctctctgagggcattcgcgagtggtgggacctgaaacctggagccccgaaacccaaagccaaccagcaaaagcaggacaacggccggggtctggtgcttcctggctacaagtacctcggacccttcaacggactcgacaagggggagcccgtcaacgcggcggacgcagcggccctcgagcacgacaaggcctacgaccagcagctccaagcgggtgacaatccgtacctgcggtataatcacgccgacgccgagtttcaggagcgtctgcaagaagatacgtcttttgggggcaacctcgggcgcgcagtcttccaggccaaaaagcgggttctcgaacctctgggcctggttgaatcgccggttaagacggctcctggaaagaagagaccggtagagccatcaccccagcgctctccagactcctctacgggcatcggcaagaaaggccagcagcccgcaaaaaagagactcaattttgggcagactggcgactcagagtcagtccccgaccctcaaccaatcggagaaccaccagcaggcccctctggtctgggatctggtacaatggctgcaggcggtggcgctccaatggcagacaataacgaaggcgccgacggagtgggtagttcctcaggaaattggcattgcgattccacatggctgggcgacagagtcatcaccaccagcacccgcacctgggccctgcccacctacaacaaccacctctacaagcaaatctccaacgggacctcgggaggaagcaccaacgacaacacctacttcggctacagcaccccctgggggtattttgacttcaacagattccactgccacttttcaccacgtgactggcagcgactcatcaacaacaactggggattccggcccaagaggctcaacttcaagctcttcaacatccaagtcaaggaggtcacgcagaatgaaggcaccaagaccatcgccaataaccttaccagcacgattcaggtctttacggactcggaataccagctcccgtacgtgctcggctcggcgcaccagggctgcctgcctccgttcccggcggacgtcttcatgattcctcagtacgggtacctgactctgaacaatggcagtcaggctgtgggccggtcgtccttctactgcctggagtactttccttctcaaatgctgagaacgggcaacaactttgaattcagctacaacttcgaggacgtgcccttccacagcagctacgcgcacagccagagcctggaccggctgatgaaccctctcatcgaccagtacttgtactacctgtcccggactcaaagcacgggcggtactgcaggaactcagcagttgctattttctcaggccgggcctaacaacatgtcggctcaggccaagaactggctacccggtccctgctaccggcagcaacgcgtctccacgacactgtcgcagaacaacaacagcaactttgcctggacgggtgccaccaagtatcatctgaatggcagagactctctggtgaatcctggcgttgccatggctacccacaaggacgacgaagagcgattttttccatccagcggagtcttaatgtttgggaaacagggagctggaaaagacaacgtggactatagcagcgtgatgctaaccagcgaggaagaaataaagaccaccaacccagtggccacagaacagtacggcgtggtggccgataacctgcaacagcaaaacgccgctcctattgtaggggccgtcaatagtcaaggagccttacctggcatggtgtggcagaaccgggacgtgtacctgcagggtcccatctgggccaagattcctcatacggacggcaactttcatccctcgccgctgatgggaggctttggactgaagcatccgcctcctcagatcctgattaaaaacacacctgttcccgcggatcctccgaccaccttcaatcaggccaagctggcttctttcatcacgcagtacagtaccggccaggtcagcgtggagatcgagtgggagctgcagaaggagaacagcaaacgctggaacccagagattcagtacacttccaactactacaaatctacaaatgtggactttgctgtcaatactgagggtacttattccgagcctcgccccattggcacccgttacctcacccgtaatctgtaa

SEQ ID NO: 895 - protein, 738 aa, synthetic construct
  REGION 1..738: note = source = /note="Description of Artificial Sequence: Synthetic polypeptide"
MAADGYLPDWLEDNLSEGIREWWDLKPGAPKPKANQQKQDNGRGLVLPGYKYLGPFNGLDKGEPVNAADAAALEHDKAYDQQLQAGDNPYLRYNHADAEFQERLQEDTSFGGNLGRAVFQAKKRVLEPLGLVESPVKTAPGKKRPVEPSPQRSPDSSTGIGKKGQQPAKKRLNFGQTGDSESVPDPQPIGEPPAGPSGLGSGTMAAGGGAPMADNNEGADGVGSSSGNWHCDSTWLGDRVITTSTRTWALPTYNNHLYKQISNGTSGGSTNDNTYFGYSTPWGYFDFNRFHCHFSPRDWQRLINNNWGFRPKRLNFKLFNIQVKEVTQNEGTKTIANNLTSTIQVFTDSEYQLPYVLGSAHQGCLPPFPADVFMIPQYGYLTLNNGSQAVGRSSFYCLEYFPSQMLRTGNNFEFSYNFEDVPFHSSYAHSQSLDRLMNPLIDQYLYYLSRTQSTGGTAGTQQLLFSQAGPNNMSAQAKNWLPGPCYRQQRVSTTLSQNNNSNFAWTGATKYHLNGRDSLVNPGVAMATHKDDEERFFPSSGVLMFGKQGAGKDNVDYSSVMLTSEEEIKTTNPVATEQYGVVADNLQQQNAAPIVGAVNSQGALPGMVWQNRDVYLQGPIWAKIPHTDGNFHPSPLMGGFGLKHPPPQILIKNTPVPADPPTTFNQAKLASFITQYSTGQVSVEIEWELQKENSKRWNPEIQYTSNYYKSTNVDFAVNTEGTYSEPRPIGTRYLTRNL

SEQ ID NO: 896 - protein, 738 aa, synthetic construct; identical to SEQ ID NO: 895
  REGION 1..738: note = source = /note="Description of Artificial Sequence: Synthetic polypeptide"

SEQ ID NO: 897 - DNA, 4472 bp, synthetic construct
  misc_feature 1..4472: note = source = /note="Description of Artificial Sequence: Synthetic polynucleotide"
  source 1..4472: mol_type = other DNA
ctccatcactaggggtaaccgcgaagcgcctcccacgctgccgcgtcagcgctgacgtaaattacgtcataggggagtggtcctgtattagctgtcacgtgagtgcttttgcgacattttgcgacaccacgtggccattcatggtatatatggccgagtgagcgagcaggatctccattttgaccgcgaaatttgaacgagcagcagccatgccgggcttctacgagatcgtgcttaaggtgccgagcgacctggacgagcacctgccgggcatttctgactcgtttgtgaactgggtggcagagaaggaatgggagctgcccccggattctgacatggatcggaatctgattgagcaggcacccctgaccgtggccgagaagctacagcgcgacttcctggtccaatggcgccgcgtgagtaaggccccggaggccctcttctttgttcagttcgagaagggcgagtcctacttccacctccatattctggtagagaccacgggggtcaaatccatggtgctgggccgcttcctgagtcagattcgggacaagctggtgcagaccatctaccgcgggatcgagccgaccctgcccaactggttcgcggtgacaaagacgcgtaatggcgccggaggggggaacaaggtggtggacgagtgctacatccccaactacctgctgcccaagactcagcccgagctgcagtgggcgtggactaacatggaggagtatataagcgcgtgcttgaacctggccgagcgcaaacggctcgtggcgcagcacctgacccacgtcagccagacccaggagcagaacaaggagaatctgaacccgaattctgacgcgcctgtcatccggtcaaaaacctccgcgcgctacatggagctggtcgggtggctggtggaccggggcatcacctccgagaagcagtggatccaggaggaccaggcctcgtacatctccttcaacgccgcctccaactcgcggtctcagatcaaggccgcgctggacaatgccggcaagatcatggcgctgaccaaatccgcgcccgactacctggtaggccccgctctgcccgcggacattaaatccaaccgcatctaccgcatcctggagctgaatggctacgaccctgcctacgccggttccgtctttctcggctgggcccagaaaaagtttggcaaaaggaacaccatctggctgtttgggccggccaccacgggcaagaccaacatcgcggaagccatcgcccacgccgtgcccttctacggctgcgtcaactggaccaatgagaactttcccttcaacgattgcgtcgacaagatggtgatctggtgggaggagggcaagatgacggccaaggtcgtggagtccgccaaggccattctcggcggcagcaaggtgcgcgtggaccaaaagtgcaagtcgtccgcccagatcgatcccacccccgtgatcgtcacctccaacaccaacatgtgcgccgtgattgacgggaacagcaccaccttcgagcaccagcagccgttgcaggaccggatgttcaaatttgaacttacccgccgtctggagcacgactttggcaaggtgacaaagcaggaagtcaaagagttcttccgctgggcgcaggatcacgtgaccgaggtggcgcatgagttctacgtcagaaagggtggagctaacaaaagacccgcccccgatgacgcggatataagcgagcccaagcgggcctgcccctcagtcgcggatccatcgacgtcagacgcggaaggagctccggtggactttgccgacaggtaccaaaacaaatgttctcgtcacgcgggcatgcttcagatgctgtttccctgcaaaacatgcgagagaatgaatcagaatttcaacatttgcttcacgcacgggaccagagactgttcagaatgtttccctggcgtgtcagaatctcaaccggtcgtcagaaaaaagacgtatcggaaactctgtgcgattcatcatctgctggggcgggcacccgagattgcttgctcggcctgcgacctggtcaacgtggacctggatgactgtgtttctgagcaataaatgacttaaaccaggtatggctgccgatggttatcttccagattggctcgaggacaacctctctgagggcattcgcgagtggtgggacctgaaacctggagccccgaaacccaaagccaaccagcaaaagcaggacaacggccggggtctggtgcttcctggctacaagtacctcggacccttcaacggactcgacaagggggagcccgtcaacgcggcggacgcagcggccctcgagcacgacaaggcctacgaccagcagctccaagcgggtgacaatccgtacctgcggtataatcacgccgacgccgagtttcaggagcgtctgcaagaagatacgtcttttgggggcaacctcgggcgcgcagtcttccaggccaaaaagcgggttctcgaacctctgggcctggttgaatcgccggttaagacggctcctggaaagaagagaccggtagagccatcaccccagcgctctccagactcctctacgggcatcggcaagaaaggccagcagcccgcaaaaaagagactcaattttgggcagactggcgactcagagtcagtccccgaccctcaaccaatcggagaaccaccagcaggcccctctggtctgggatctggtacaatggctgcaggcggtggcgctccaatggcagacaataacgaaggcgccgacggagtgggtagttcctcaggaaattggcattgcgattccacatggctgggcgacagagtcatcaccaccagcacccgcacctgggccctgcccacctacaacaaccacctctacaagcaaatctccaacgggacctcgggaggaagcaccaacgacaacacctacttcggctacagcaccccctgggggtattttgacttcaacagattccactgccacttttcaccacgtgactggcagcgactcatcaacaacaactggggattccggcccaagaggctcaacttcaagctcttcaacatccaagtcaaggaggtcacgcagaatgaaggcaccaagaccatcgccaataaccttaccagcacgattcaggtctttacggactcggaataccagctcccgtacgtgctcggctcggcgcaccagggctgcctgcctccgttcccggcggacgtcttcatgattcctcagtacgggtacctgactctgaacaatggcagtcaggctgtgggccggtcgtccttctactgcctggagtactttccttctcaaatgctgagaacgggcaacaactttgaattcagctacaacttcgaggacgtgcccttccacagcagctacgcgcacagccagagcctggaccggctgatgaaccctctcatcgaccagtacttgtactacctgtcccggactcaaagcacgggcggtactgcaggaactcagcagttgctattttctcaggccgggcctaacaacatgtcggctcaggccaagaactggctacccggtccctgctaccggcagcaacgcgtctccacgacactgtcgcagaacaacaacagcaactttgcctggacgggtgccaccaagtatcatctgaatggcagagactctctggtgaatcctggcgttgccatggctacccacaaggacgacgaagagcgattttttccatccagcggagtcttaatgtttgggaaacagggagctggaaaagacaacgtggactatagcagcgtgatgctaaccagcgaggaagaaataaagaccaccaacccagtggccacagaacagtacggcgtggtggccgataacctgcaacagcaaaacgccgctcctattgtaggggccgtcaatagtcaaggagccttacctggcatggtgtggcagaaccgggacgtgtacctgcagggtcccatctgggccaagattcctcatacggacggcaactttcatccctcgccgctgatgggaggctttggactgaagcatccgcctcctcagatcctgattaaaaacacacctgttcccgcggatcctccgaccaccttcaatcaggccaagctggcttctttcatcacgcagtacagtaccggccaggtcagcgtggagatcgagtgggagctgcagaaggagaacagcaaacgctggaacccagagattcagtacacttccaactactacaaatctacaaatgtggactttgctgtcaatactgagggtacttattccgagcctcgccccattggcacccgttacctcacccgtaatctgtaattacatgttaatcaataaaccggttaattcgtttcagttgaactttggtctcctgtccttcttatcttatcggttaccatagaaactggttacttattaactgcttggtgcgcttcgcgataaaagacttacgtcatcgggttacccctagtgatgga

SEQ ID NO: 898 - protein, 738 aa, synthetic construct
  REGION 1..738: note = source = /note="Description of Artificial Sequence: Synthetic polypeptide"
MAADGYLPDWLEDNLSEGIREWWDLKPGAPKPKANQQKQDNGRGLVLPGYKYLGPFNGLDKGEPVNAADAAALEHDKAYDQQLQAGDNPYLRYNHADAEFQERLQEDTSFGGNLGRAVFQAKKRVLEPLGLVESPVKTAPGKKRPVEPSPQRSPDSSTGIGKKGQQPAKKRLNFGQTGDSESVPDPQPIGEPPAAPSGVGPNTMAAGGGAPMADNNEGADGVGSSSGNWHCDSTWLGDRVITTSTRTWALPTYNNHLYKQISNGTSGGSTNDNTYFGYSTPWGYFDFNRFHCHFSPRDWQRLINNNWGFRPKRLNFKLFNIQVKEVTQNEGTKTIANNLTSTIQVFTDSEYQLPYVLGSAHQGCLPPFPADVFMIPQYGYLTLNNGSQAVGRSSFYCLEYFPSQMLRTGNNFEFSYNFEDVPFHSSYAHSQSLDRLMNPLIDQYLYYLSRTQSTGGTAGTQQLLFSQAGPNNMSAQAKNWLPGPCYRQQRVSTTLSQNNNSNFAWTGATKYHLNGRDSLVNPGVAMATHKDDEERFFPSSGVLMFGKQGAGKDNVDYSSVMLTSEEEIKTTNPVATEQYGVVADNLQQQNAAPIVGAVNSQGALPGMVWQNRDVYLQGPIWAKIPHTDGNFHPSPLMGGFGLKHPPPQILIKNTPVPADPPTTFNQAKLASFITQYSTGQVSVEIEWELQKENSKRWNPEIQYTSNYYKSTNVDFAVNTEGTYSEPRPIGTRYLTRNL

SEQ ID NO: 899 - protein, 738 aa, synthetic construct
  REGION 1..738: note = source = /note="Description of Artificial Sequence: Synthetic polypeptide"
MAADGYLPDWLEDNLSEGIREWWDLKPGAPKPKANQQRQDNGRGLVLPGYRYLGPFNGLDKGEPVNAADAAALEHDRAYDQQLQAGDNPYLRYNHADAEFQERLQEDTSFGGNLGRAVFQAKKRVLEPLGLVESPVRTAPGKKRPVEPSPQRSPDSSTGIGKKGQQPARKRLNFGQTGDSESVPDPQPIGEPPAAPSGVGPNTMAAGGGAPMADNNEGADGVGSSSGNWHCDSTWLGDRVITTSTRTWALPTYNNHLYRQISNGTSGGSTNDNTYFGYSTPWGYFDFNRFHCHFSPRDWQRLINNNWGFRPKRLNFKLFNIQVKEVTQNEGTRTIANNLTSTIQVFTDSEYQLPYVLGSAHQGCLPPFPADVFMIPQYGYLTLNNGSQAVGRSSFYCLEYFPSQMLRTGNNFEFSYNFEDVPFHSSYAHSQSLDRLMNPLIDQYLYYLSRTQSTGGTAGTQQLLFSQAGPNNMSAQAKNWLPGPCYRQQRVSTTLSQNNNSNFAWTGATKYHLNGRDSLVNPGVAMATHRDDEERFFPSSGVLMFGRQGAGRDNVDYSSVMLTSEEEIRTTNPVATEQYGVVADNLQQQNAAPIVGAVNSQGALPGMVWQNRDVYLQGPIWAKIPHTDGNFHPSPLMGGFGLKHPPPQILIKNTPVPADPPTTFNQAKLASFITQYSTGQVSVEIEWELQKENSKRWNPEIQYTSNYYKSTNVDFAVNTEGTYSEPRPIGTRYLTRNL

SEQ ID NO: 900 - protein, 738 aa, synthetic construct
  REGION 1..738: note = source = /note="Description of Artificial Sequence: Synthetic polypeptide"
MAADGYLPDWLEDNLSEGIREWWDLKPGAPKPKANQQRQDNGRGLVLPGYRYLGPFNGLDKGEPVNAADAAALEHDRAYDQQLQAGDNPYLRYNHADAEFQERLQEDTSFGGNLGRAVFQAKKRVLEPLGLVESPVRTAPGKKRPVEPSPQRSPDSSTGIGKRGQQPARKRLNFGQTGDSESVPDPQPIGEPPAAPSGVGPNTMAAGGGAPMADNNEGADGVGSSSGNWHCDSTWLGDRVITTSTRTWALPTYNNHLYRQISNGTSGGSTNDNTYFGYSTPWGYFDFNRFHCHFSPRDWQRLINNNWGFRPKRLNFKLFNIQVKEVTQNEGTRTIANNLTSTIQVFTDSEYQLPYVLGSAHQGCLPPFPADVFMIPQYGYLTLNNGSQAVGRSSFYCLEYFPSQMLRTGNNFEFSYNFEDVPFHSSYAHSQSLDRLMNPLIDQYLYYLSRTQSTGGTAGTQQLLFSQAGPNNMSAQAKNWLPGPCYRQQRVSTTLSQNNNSNFAWTGATKYHLNGRDSLVNPGVAMATHRDDEERFFPSSGVLMFGKQGAGRDNVDYSSVMLTSEEEIRTTNPVATEQYGVVADNLQQQNAAPIVGAVNSQGALPGMVWQNRDVYLQGPIWAKIPHTDGNFHPSPLMGGFGLKHPPPQILIKNTPVPADPPTTFNQAKLASFITQYSTGQVSVEIEWELQKENSKRWNPEIQYTSNYYKSTNVDFAVNTEGTYSEPRPIGTRYLTRNL

SEQ ID NO: 901 - protein, 738 aa, synthetic construct
  REGION 1..738: note = source = /note="Description of Artificial Sequence: Synthetic polypeptide"
MAADGYLPDWLEDNLSEGIREWWDLKPGAPKPKANQQRQDNGRGLVLPGYRYLGPFNGLDKGEPVNAADAAALEHDRAYDQQLQAGDNPYLRYNHADAEFQERLQEDTSFGGNLGRAVFQAKKRVLEPLGLVESPVRTAPGKKRPVEPSPQRSPDSSTGIGKRGQQPAKKRLNFGQTGDSESVPDPQPIGEPPAAPSGVGPNTMAAGGGAPMADNNEGADGVGSSSGNWHCDSTWLGDRVITTSTRTWALPTYNNHLYRQISNGTSGGSTNDNTYFGYSTPWGYFDFNRFHCHFSPRDWQRLINNNWGFRPKRLNFKLFNIQVKEVTQNEGTRTIANNLTSTIQVFTDSEYQLPYVLGSAHQGCLPPFPADVFMIPQYGYLTLNNGSQAVGRSSFYCLEYFPSQMLRTGNNFEFSYNFEDVPFHSSYAHSQSLDRLMNPLIDQYLYYLSRTQSTGGTAGTQQLLFSQAGPNNMSAQAKNWLPGPCYRQQRVSTTLSQNNNSNFAWTGATKYHLNGRDSLVNPGVAMATHRDDEERFFPSSGVLMFGRQGAGRDNVDYSSVMLTSEEEIRTTNPVATEQYGVVADNLQQQNAAPIVGAVNSQGALPGMVWQNRDVYLQGPIWAKIPHTDGNFHPSPLMGGFGLKHPPPQILIKNTPVPADPPTTFNQAKLASFITQYSTGQVSVEIEWELQKENSKRWNPEIQYTSNYYKSTNVDFAVNTEGTYSEPRPIGTRYLTRNL

SEQ ID NO: 902 - protein, 738 aa, synthetic construct
  REGION 1..738: note = source = /note="Description of Artificial Sequence: Synthetic polypeptide"
MAADGYLPDWLEDNLSEGIREWWDLKPGAPKPKANQQRQDNGRGLVLPGYRYLGPFNGLDKGEPVNAADAAALEHDRAYDQQLQAGDNPYLRYNHADAEFQERLQEDTSFGGNLGRAVFQAKKRVLEPLGLVESPVRTAPGKKRPVEPSPQRSPDSSTGIGKRGQQPAKKRLNFGQTGDSESVPDPQPIGEPPAAPSGVGPNTMAAGGGAPMADNNEGADGVGSSSGNWHCDSTWLGDRVITTSTRTWALPTYNNHLYRQISNGTSGGSTNDNTYFGYSTPWGYFDFNRFHCHFSPRDWQRLINNNWGFRPKRLNFKLFNIQVKEVTQNEGTRTIANNLTSTIQVFTDSEYQLPYVLGSAHQGCLPPFPADVFMIPQYGYLTLNNGSQAVGRSSFYCLEYFPSQMLRTGNNFEFSYNFEDVPFHSSYAHSQSLDRLMNPLIDQYLYYLSRTQSTGGTAGTQQLLFSQAGPNNMSAQAKNWLPGPCYRQQRVSTTLSQNNNSNFAWTGATKYHLNGRDSLVNPGVAMATHRDDEERFFPSSGVLMFGKQGAGRDNVDYSSVMLTSEEEIRTTNPVATEQYGVVADNLQQQNAAPIVGAVNSQGALPGMVWQNRDVYLQGPIWAKIPHTDGNFHPSPLMGGFGLKHPPPQILIKNTPVPADPPTTFNQARLASFITQYSTGQVSVEIEWELQKENSKRWNPEIQYTSNYYKSTNVDFAVNTEGTYSEPRPIGTRYLTRNL

SEQ ID NO: 903 - protein, 738 aa, synthetic construct
  REGION 1..738: note = source = /note="Description of Artificial Sequence: Synthetic polypeptide"
MAADGYLPDWLEDNLSEGIREWWDLKPGAPKPKANQQRQDNGRGLVLPGYRYLGPFNGLDKGEPVNAADAAALEHDRAYDQQLQAGDNPYLRYNHADAEFQERLQEDTSFGGNLGRAVFQAKKRVLEPLGLVESPVRTAPGKKRPVEPSPQRSPDSSTGIGKKGQQPAKKRLNFGQTGDSESVPDPQPIGEPPAAPSGVGPNTMAAGGGAPMADNNEGADGVGSSSGNWHCDSTWLGDRVITTSTRTWALPTYNNHLYRQISNGTSGGSTNDNTYFGYSTPWGYFDFNRFHCHFSPRDWQRLINNNWGFRPKRLNFKLFNIQVKEVTQNEGTRTIANNLTSTIQVFTDSEYQLPYVLGSAHQGCLPPFPADVFMIPQYGYLTLNNGSQAVGRSSFYCLEYFPSQMLRTGNNFEFSYNFEDVPFHSSYAHSQSLDRLMNPLIDQYLYYLSRTQSTGGTAGTQQLLFSQAGPNNMSAQAKNWLPGPCYRQQRVSTTLSQNNNSNFAWTGATKYHLNGRDSLVNPGVAMATHRDDEERFFPSSGVLMFGRQGAGRDNVDYSSVMLTSEEEIRTTNPVATEQYGVVADNLQQQNAAPIVGAVNSQGALPGMVWQNRDVYLQGPIWAKIPHTDGNFHPSPLMGGFGLKHPPPQILIKNTPVPADPPTTFNQARLASFITQYSTGQVSVEIEWELQKENSKRWNPEIQYTSNYYKSTNVDFAVNTEGTYSEPRPIGTRYLTRNL

SEQ ID NO: 904 - DNA, 2214 bp, synthetic construct
  misc_feature 1..2214: note = source = /note="Description of Artificial Sequence: Synthetic polynucleotide"
  source 1..2214: mol_type = other DNA
atggctgccgatggttatcttccagattggctcgaggacaacctctctgagggcattcgcgagtggtgggacctgaaacctggagccccgaaacccaaagccaaccagcaaaagcaggacaacggccggggtctggtgcttcctggctacaagtacctcggacccttcaacggactcgacaagggggagcccgtcaacgcggcggacgcagcggccctcgagcacgacaaggcctacgaccagcagctccaagcgggtgacaatccgtacctgcggtataatcacgccgacgccgagtttcaggagcgtctgcaagaagatacgtcttttgggggcaacctcgggcgcgcagtcttccaggccaaaaagcgggttctcgaacctctgggcctggttgaatcgccggttaagacggctcctggaaagaagagaccggtagagccatcaccccagcgctctccagactcctctacgggcatcggcaagaaaggccagcagcccgcaaaaaagagactcaattttgggcagactggcgactcagagtcagtccccgaccctcaaccaatcggagaaccaccagcagccccctctggtgtgggacctaatacaatggctgcaggcggtggcgctccaatggcagacaataacgaaggcgccgacggagtgggtagttcctcaggaaattggcattgcgattccacatggctgggcgacagagtcatcaccaccagcacccgcacctgggccctgcccacctacaacaaccacctctacaagcaaatctccaacgggacctcgggaggaagcaccaacgacaacacctacttcggctacagcaccccctgggggtattttgacttcaacagattccactgccacttttcaccacgtgactggcagcgactcatcaacaacaactggggattccggcccaagaggctcaacttcaagctcttcaacatccaagtcaaggaggtcacgcagaatgaaggcaccaagaccatcgccaataaccttaccagcacgattcaggtctttacggactcggaataccagctcccgtacgtgctcggctcggcgcaccagggctgcctgcctccgttcccggcggacgtcttcatgattcctcagtacgggtacctgactctgaacaatggcagtcaggctgtgggccggtcgtccttctactgcctggagtactttccttctcaaatgctgagaacgggcaacaactttgaattcagctacaacttcgaggacgtgcccttccacagcagctacgcgcacagccagagcctggaccggctgatgaaccctctcatcgaccagtacttgtactacctgtcccggactcaaagcacgggcggtactgcaggaactcagcagttgctattttctcaggccgggcctaacaacatgtcggctcaggccaagaactggctacccggtccctgctaccggcagcaacgcgtctccacgacactgtcgcagaacaacaacagcaactttgcctggacgggtgccaccaagtatcatctgaatggcagagactctctggtgaatcctggcgttgccatggctacccacaaggacgacgaagagcgattttttccatccagcggagtcttaatgtttgggaaacagggagctggaaaagacaacgtggactatagcagcgtgatgctaaccagcgaggaagaaataaagaccaccaacccagtggccacagaacagtacggcgtggtggccgataacctgcaacagcaaaacgccgctcctattgtaggggccgtcaatagtcaaggagccttacctggcatggtgtggcagaaccgggacgtgtacctgcagggtcccatctgggccaagattcctcatacggacggcaactttcatccctcgccgctgatgggaggctttggactgaagcatccgcctcctcagatcctgattaaaaacacacctgttcccgcggatcctccgaccaccttcaatcaggccaagctggcttctttcatcacgcagtacagtaccggccaggtcagcgtggagatcgagtgggagctgcagaaggagaacagcaaacgctggaacccagagattcagtacacttccaactactacaaatctacaaatgtggactttgctgtcaatactgagggtacttattccgagcctcgccccattggcacccgttacctcacccgtaatctg

SEQ ID NO: 905 - DNA, 2217 bp, synthetic construct
  misc_feature 1..2217: note = source = /note="Description of Artificial Sequence: Synthetic polynucleotide"
  source 1..2217: mol_type = other DNA
atggctgccgatggttatcttccagattggctcgaggacaacctctctgagggcattcgcgagtggtgggacctgaaacctggagccccgaaacccaaagccaaccagcaaaggcaggacaacggccggggtctggtgcttcctggctacaggtacctcggacccttcaacggactcgacaagggggagcccgtcaacgcggcggacgcagcggccctcgagcacgacagggcctacgaccagcagctccaagcgggtgacaatccgtacctgcggtataatcacgccgacgccgagtttcaggagcgtctgcaagaagatacgtcttttgggggcaacctcgggcgcgcagtcttccaggccaaaaagcgggttctcgaacctctgggcctggttgaatcgccggttaggacggctcctggaaagaagagaccggtagagccatcaccccagcgctctccagactcctctacgggcatcggcaagaaaggccagcagcccgcaagaaagagactcaattttgggcagactggcgactcagagtcagtccccgaccctcaaccaatcggagaaccaccagcagccccctctggtgtgggacctaatacaatggctgcaggcggtggcgctccaatggcagacaataacgaaggcgccgacggagtgggtagttcctcaggaaattggcattgcgattccacatggctgggcgacagagtcatcaccaccagcacccgcacctgggccctgcccacctacaacaaccacctctacaggcaaatctccaacgggacctcgggaggaagcaccaacgacaacacctacttcggctacagcaccccctgggggtattttgacttcaacagattccactgccacttttcaccacgtgactggcagcgactcatcaacaacaactggggattccggcccaagaggctcaacttcaagctcttcaacatccaagtcaaggaggtcacgcagaatgaaggcaccaggaccatcgccaataaccttaccagcacgattcaggtctttacggactcggaataccagctcccgtacgtgctcggctcggcgcaccagggctgcctgcctccgttcccggcggacgtcttcatgattcctcagtacgggtacctgactctgaacaatggcagtcaggctgtgggccggtcgtccttctactgcctggagtactttccttctcaaatgctgagaacgggcaacaactttgaattcagctacaacttcgaggacgtgcccttccacagcagctacgcgcacagccagagcctggaccggctgatgaaccctctcatcgaccagtacttgtactacctgtcccggactcaaagcacgggcggtactgcaggaactcagcagttgctattttctcaggccgggcctaacaacatgtcggctcaggccaagaactggctacccggtccctgctaccggcagcaacgcgtctccacgacactgtcgcagaacaacaacagcaactttgcctggacgggtgccaccaagtatcatctgaatggcagagactctctggtgaatcctggcgttgccatggctacccacagggacgacgaagagcgattttttccatccagcggagtcttaatgtttgggagacagggagctggaagagacaacgtggactatagcagcgtgatgctaaccagcgaggaagaaataaggaccaccaacccagtggccacagaacagtacggcgtggtggccgataacctgcaacagcaaaacgccgctcctattgtaggggccgtcaatagtcaaggagccttacctggcatggtgtggcagaaccgggacgtgtacctgcagggtcccatctgggccaagattcctcatacggacggcaactttcatccctcgccgctgatgggaggctttggactgaagcatccgcctcctcagatcctgattaaaaacacacctgttcccgcggatcctccgaccaccttcaatcaggccaagctggcttctttcatcacgcagtacagtaccggccaggtcagcgtggagatcgagtgggagctgcagaaggagaacagcaaacgctggaacccagagattcagtacacttccaactactacaaatctacaaatgtggactttgctgtcaatactgagggtacttattccgagcctcgccccattggcacccgttacctcacccgtaatctgtaa

SEQ ID NO: 906 - DNA, 2217 bp, synthetic construct
  misc_feature 1..2217: note = source = /note="Description of Artificial Sequence: Synthetic polynucleotide"
  source 1..2217: mol_type = other DNA
atggctgccgatggttatcttccagattggctcgaggacaacctctctgagggcattcgcgagtggtgggacctgaaacctggagccccgaaacccaaagccaaccagcaaaggcaggacaacggccggggtctggtgcttcctggctacaggtacctcggacccttcaacggactcgacaagggggagcccgtcaacgcggcggacgcagcggccctcgagcacgacagggcctacgaccagcagctccaagcgggtgacaatccgtacctgcggtataatcacgccgacgccgagtttcaggagcgtctgcaagaagatacgtcttttgggggcaacctcgggcgcgcagtcttccaggccaaaaagcgggttctcgaacctctgggcctggttgaatcgccggttaggacggctcctggaaagaagagaccggtagagccatcaccccagcgctctccagactcctctacgggcatcggcaagagaggccagcagcccgcaagaaagagactcaattttgggcagactggcgactcagagtcagtccccgaccctcaaccaatcggagaaccaccagcagccccctctggtgtgggacctaatacaatggctgcaggcggtggcgctccaatggcagacaataacgaaggcgccgacggagtgggtagttcctcaggaaattggcattgcgattccacatggctgggcgacagagtcatcaccaccagcacccgcacctgggccctgcccacctacaacaaccacctctacaggcaaatctccaacgggacctcgggaggaagcaccaacgacaacacctacttcggctacagcaccccctgggggtattttgacttcaacagattccactgccacttttcaccacgtgactggcagcgactcatcaacaacaactggggattccggcccaagaggctcaacttcaagctcttcaacatccaagtcaaggaggtcacgcagaatgaaggcaccaggaccatcgccaataaccttaccagcacgattcaggtctttacggactcggaataccagctcccgtacgtgctcggctcggcgcaccagggctgcctgcctccgttcccggcggacgtcttcatgattcctcagtacgggtacctgactctgaacaatggcagtcaggctgtgggccggtcgtccttctactgcctggagtactttccttctcaaatgctgagaacgggcaacaactttgaattcagctacaacttcgaggacgtgcccttccacagcagctacgcgcacagccagagcctggaccggctgatgaaccctctcatcgaccagtacttgtactacctgtcccggactcaaagcacgggcggtactgcaggaactcagcagttgctattttctcaggccgggcctaacaacatgtcggctcaggccaagaactggctacccggtccctgctaccggcagcaacgcgtctccacgacactgtcgcagaacaacaacagcaactttgcctggacgggtgccaccaagtatcatctgaatggcagagactctctggtgaatcctggcgttgccatggctacccacagggacgacgaagagcgattttttccatccagcggagtcttaatgtttgggaaacagggagctggaagagacaacgtggactatagcagcgtgatgctaaccagcgaggaagaaataaggaccaccaacccagtggccacagaacagtacggcgtggtggccgataacctgcaacagcaaaacgccgctcctattgtaggggccgtcaatagtcaaggagccttacctggcatggtgtggcagaaccgggacgtgtacctgcagggtcccatctgggccaagattcctcatacggacggcaactttcatccctcgccgctgatgggaggctttggactgaagcatccgcctcctcagatcctgattaaaaacacacctgttcccgcggatcctccgaccaccttcaatcaggccaagctggcttctttcatcacgcagtacagtaccggccaggtcagcgtggagatcgagtgggagctgcagaaggagaacagcaaacgctggaacccagagattcagtacacttccaactactacaaatctacaaatgtggactttgctgtcaatactgagggtacttattccgagcctcgccccattggcacccgttacctcacccgtaatctgtaa

SEQ ID NO: 907 - DNA, 2217 bp, synthetic construct
  misc_feature 1..2217: note = source = /note="Description of Artificial Sequence: Synthetic polynucleotide"
  source 1..2217: mol_type = other DNA
atggctgccgatggttatcttccagattggctcgaggacaacctctctgagggcattcgcgagtggtgggacctgaaacctggagccccgaaacccaaagccaaccagcaaaggcaggacaacggccggggtctggtgcttcctggctacaggtacctcggacccttcaacggactcgacaagggggagcccgtcaacgcggcggacgcagcggccctcgagcacgacagggcctacgaccagcagctccaagcgggtgacaatccgtacctgcggtataatcacgccgacgccgagtttcaggagcgtctgcaagaagatacgtcttttgggggcaacctcgggcgcgcagtcttccaggccaaaaagcgggttctcgaacctctgggcctggttgaatcgccggttaggacggctcctggaaagaagagaccggtagagccatcaccccagcgctctccagactcctctacgggcatcggcaagagaggccagcagcccgcaaaaaagagactcaattttgggcagactggcgactcagagtcagtccccgaccctcaaccaatcggagaaccaccagcagccccctctggtgtgggacctaatacaatggctgcaggcggtggcgctccaatggcagacaataacgaaggcgccgacggagtgggtagttcctcaggaaattggcattgcgattccacatggctgggcgacagagtcatcaccaccagcacccgcacctgggccctgcccacctacaacaaccacctctacaggcaaatctccaacgggacctcgggaggaagcaccaacgacaacacctacttcggctacagcaccccctgggggtattttgacttcaacagattccactgccacttttcaccacgtgactggcagcgactcatcaacaacaactggggattccggcccaagaggctcaacttcaagctcttcaacatccaagtcaaggaggtcacgcagaatgaaggcaccaggaccatcgccaataaccttaccagcacgattcaggtctttacggactcggaataccagctcccgtacgtgctcggctcggcgcaccagggctgcctgcctccgttcccggcggacgtcttcatgattcctcagtacgggtacctgactctgaacaatggcagtcaggctgtgggccggtcgtccttctactgcctggagtactttccttctcaaatgctgagaacgggcaacaactttgaattcagctacaacttcgaggacgtgcccttccacagcagctacgcgcacagccagagcctggaccggctgatgaaccctctcatcgaccagtacttgtactacctgtcccggactcaaagcacgggcggtactgcaggaactcagcagttgctattttctcaggccgggcctaacaacatgtcggctcaggccaagaactggctacccggtccctgctaccggcagcaacgcgtctccacgacactgtcgcagaacaacaacagcaactttgcctggacgggtgccaccaagtatcatctgaatggcagagactctctggtgaatcctggcgttgccatggctacccacagggacgacgaagagcgattttttccatccagcggagtcttaatgtttgggagacagggagctggaagagacaacgtggactatagcagcgtgatgctaaccagcgaggaagaaataaggaccaccaacccagtggccacagaacagtacggcgtggtggccgataacctgcaacagcaaaacgccgctcctattgtaggggccgtcaatagtcaaggagccttacctggcatggtgtggcagaaccgggacgtgtacctgcagggtcccatctgggccaagattcctcatacggacggcaactttcatccctcgccgctgatgggaggctttggactgaagcatccgcctcctcagatcctgattaaaaacacacctgttcccgcggatcctccgaccaccttcaatcaggccaagctggcttctttcatcacgcagtacagtaccggccaggtcagcgtggagatcgagtgggagctgcagaaggagaacagcaaacgctggaacccagagattcagtacacttccaactactacaaatctacaaatgtggactttgctgtcaatactgagggtacttattccgagcctcgccccattggcacccgttacctcacccgtaatctgtaa

SEQ ID NO: 908 - DNA, 2217 bp, synthetic construct
  misc_feature 1..2217: note = source = /note="Description of Artificial Sequence: Synthetic polynucleotide"
  source 1..2217: mol_type = other DNA
atggctgccgatggttatcttccagattggctcgaggacaacctctctgagggcattcgcgagtggtgggacctgaaacctggagccccgaaacccaaagccaaccagcaaaggcaggacaacggccggggtctggtgcttcctggctacaggtacctcggacccttcaacggactcgacaagggggagcccgtcaacgcggcggacgcagcggccctcgagcacgacagggcctacgaccagcagctccaagcgggtgacaatccgtacctgcggtataatcacgccgacgccgagtttcaggagcgtctgcaagaagatacgtcttttgggggcaacctcgggcgcgcagtcttccaggccaaaaagcgggttctcgaacctctgggcctggttgaatcgccggttaggacggctcctggaaagaagagaccggtagagccatcaccccagcgctctccagactcctctacgggcatcggcaagagaggccagcagcccgcaaaaaagagactcaattttgggcagactggcgactcagagtcagtccccgaccctcaaccaatcggagaaccaccagcagccccctctggtgtgggacctaatacaatggctgcaggcggtggcgctccaatggcagacaataacgaaggcgccgacggagtgggtagttcctcaggaaattggcattgcgattccacatggctgggcgacagagtcatcaccaccagcacccgcacctgggccctgcccacctacaacaaccacctctacaggcaaatctccaacgggacctcgggaggaagcaccaacgacaacacctacttcggctacagcaccccctgggggtattttgacttcaacagattccactgccacttttcaccacgtgactggcagcgactcatcaacaacaactggggattccggcccaagaggctcaacttcaagctcttcaacatccaagtcaaggaggtcacgcagaatgaaggcaccaggaccatcgccaataaccttaccagcacgattcaggtctttacggactcggaataccagctcccgtacgtgctcggctcggcgcaccagggctgcctgcctccgttcccggcggacgtcttcatgattcctcagtacgggtacctgactctgaacaatggcagtcaggctgtgggccggtcgtccttctactgcctggagtactttccttctcaaatgctgagaacgggcaacaactttgaattcagctacaacttcgaggacgtgcccttccacagcagctacgcgcacagccagagcctggaccggctgatgaaccctctcatcgaccagtacttgtactacctgtcccggactcaaagcacgggcggtactgcaggaactcagcagttgctattttctcaggccgggcctaacaacatgtcggctcaggccaagaactggctacccggtccctgctaccggcagcaacgcgtctccacgacactgtcgcagaacaacaacagcaactttgcctggacgggtgccaccaagtatcatctgaatggcagagactctctggtgaatcctggcgttgccatggctacccacagggacgacgaagagcgattttttccatccagcggagtcttaatgtttgggaaacagggagctggaagagacaacgtggactatagcagcgtgatgctaaccagcgaggaagaaataaggaccaccaacccagtggccacagaacagtacggcgtggtggccgataacctgcaacagcaaaacgccgctcctattgtaggggccgtcaatagtcaaggagccttacctggcatggtgtggcagaaccgggacgtgtacctgcagggtcccatctgggccaagattcctcatacggacggcaactttcatccctcgccgctgatgggaggctttggactgaagcatccgcctcctcagatcctgattaaaaacacacctgttcccgcggatcctccgaccaccttcaatcaggccaggctggcttctttcatcacgcagtacagtaccggccaggtcagcgtggagatcgagtgggagctgcagaaggagaacagcaaacgctggaacccagagattcagtacacttccaactactacaaatctacaaatgtggactttgctgtcaatactgagggtacttattccgagcctcgccccattggcacccgttacctcacccgtaatctgtaa

SEQ ID NO: 909 - DNA, 2217 bp, synthetic construct
  misc_feature 1..2217: note = source = /note="Description of Artificial Sequence: Synthetic polynucleotide"
  source 1..2217: mol_type = other DNA
atggctgccgatggttatcttccagattggctcgaggacaacctctctgagggcattcgcgagtggtgggacctgaaacctggagccccgaaacccaaagccaaccagcaaaggcaggacaacggccggggtctggtgcttcctggctacaggtacctcggacccttcaacggactcgacaagggggagcccgtcaacgcggcggacgcagcggccctcgagcacgacagggcctacgaccagcagctccaagcgggtgacaatccgtacctgcggtataatcacgccgacgccgagtttcaggagcgtctgcaagaagatacgtcttttgggggcaacctcgggcgcgcagtcttccaggccaaaaagcgggttctcgaacctctgggcctggttgaatcgccggttaggacggctcctggaaagaagagaccggtagagccatcaccccagcgctctccagactcctctacgggcatcggcaagaaaggccagcagcccgcaaaaaagagactcaattttgggcagactggcgactcagagtcagtccccgaccctcaaccaatcggagaaccaccagcagccccctctggtgtgggacctaatacaatggctgcaggcggtggcgctccaatggcagacaataacgaaggcgccgacggagtgggtagttcctcaggaaattggcattgcgattccacatggctgggcgacagagtcatcaccaccagcacccgcacctgggccctgcccacctacaacaaccacctctacaggcaaatctccaacgggacctcgggaggaagcaccaacgacaacacctacttcggctacagcaccccctgggggtattttgacttcaacagattccactgccacttttcaccacgtgactggcagcgactcatcaacaacaactggggattccggcccaagaggctcaacttcaagctcttcaacatccaagtcaaggaggtcacgcagaatgaaggcaccaggaccatcgccaataaccttaccagcacgattcaggtctttacggactcggaataccagctcccgtacgtgctcggctcggcgcaccagggctgcctgcctccgttcccggcggacgtcttcatgattcctcagtacgggtacctgactctgaacaatggcagtcaggctgtgggccggtcgtccttctactgcctggagtactttccttctcaaatgctgagaacgggcaacaactttgaattcagctacaacttcgaggacgtgcccttccacagcagctacgcgcacagccagagcctggaccggctgatgaaccctctcatcgaccagtacttgtactacctgtcccggactcaaagcacgggcggtactgcaggaactcagcagttgctattttctcaggccgggcctaacaacatgtcggctcaggccaagaactggctacccggtccctgctaccggcagcaacgcgtctccacgacactgtcgcagaacaacaacagcaactttgcctggacgggtgccaccaagtatcatctgaatggcagagactctctggtgaatcctggcgttgccatggctacccacagggacgacgaagagcgattttttccatccagcggagtcttaatgtttgggagacagggagctggaagagacaacgtggactatagcagcgtgatgctaaccagcgaggaagaaataaggaccaccaacccagtggccacagaacagtacggcgtggtggccgataacctgcaacagcaaaacgccgctcctattgtaggggccgtcaatagtcaaggagccttacctggcatggtgtggcagaaccgggacgtgtacctgcagggtcccatctgggccaagattcctcatacggacggcaactttcatccctcgccgctgatgggaggctttggactgaagcatccgcctcctcagatcctgattaaaaacacacctgttcccgcggatcctccgaccaccttcaatcaggccaggctggcttctttcatcacgcagtacagtaccggccaggtcagcgtggagatcgagtgggagctgcagaaggagaacagcaaacgctggaacccagagattcagtacacttccaactactacaaatctacaaatgtggactttgctgtcaatactgagggtacttattccgagcctcgccccattggcacccgttacctcacccgtaatctgtaa

SEQ ID NO: 910 - protein, 744 aa, synthetic construct
  REGION 1..744: note = source = /note="Description of Artificial Sequence: Synthetic polypeptide"
MAADGYLPDWLEDTLSEGIRQWWKLKPGPPPPKPAERHKDDSRGLVLPGYKYLGPFNGLDKGEPVNEADAAALEHDKAYDRQLDSGDNPYLKYNHADAEFQERLKEDTSFGGNLGRAVFQAKKRVLEPLGLVEEPVKTAPGKKRPVEHSPVEPDSSSGTGKAGQQPARKRLNFGQTGDADSVPDPQPLGQPPAAPSGLGTNTMATGSGAPMADNNEGADGVGNSSGNWHCDSTWMGDRVITTSTRTWALPTYNNHLYKQISSQSGASNDNHYFGYSTPWGYFDFNRFHCHFSPRDWQRLINNNWGFRPKRLNFKLFNIQVKEVTQNDGTTTIANNLTSTVQVFTDSEYQLPYVLGSAHQGCLPPFPADVFMVPQYGYLTLNNGSQAVGRSSFYCLEYFPSQMLRTGNNFTFSYTFEDVPFHSSYAHSQSLDRLMNPLIDQYLYYLSRTNTPSGTTTQSRLQFSQAGASDIRDQSRNWLPGPCYRQQRVSKTSADNNNSEYSWTGATKYHLNGRDSLVNPGPAMASHKDDEEKFFPQSGVLIFGKQGSEKTNVDIEKVMITDEEEIRTTNPVATEQYGSVSTNLQRGQRGESGHGYFAQAATADVNTQGVLPGMVWQDRDVYLQGPIWAKIPHTDGHFHPSPLMGGFGLKHPPPQILIKNTPVPANPSTTFSAAKFASFITQYSTGQVSVEIEWELQKENSKRWNPEIQYTSNYNKSVNVDFTVDTNGVYSEPRPIGTRYLTRNL

SEQ ID NO: 911 - DNA, 8359 bp, synthetic construct
  misc_feature 1..8359: note = source = /note="Description of Artificial Sequence: Synthetic polynucleotide"
  source 1..8359: mol_type = other DNA
catcatcaataatataccttattttggattgaagccaatatgataatgagggggtggagtttgtgacgtggcgcggggcgtgggaacggggcgggtgacgtagtagctctagaggtcctgtattagaggtcacgtgagtgttttgcgacattttgcgacaccatgtggtcacgctgggtatttaagcccgagtgagcacgcagggtctccattttgaagcgggaggtttgaacgcgcagccgccatgccggggttttacgagattgtgattaaggtccccagcgaccttgacgagcatctgcccggcatttctgacagctttgtgaactgggtggccgagaaggaatgggagttgccgccagattctgacatggatctgaatctgattgagcaggcacccctgaccgtggccgagaagctgcagcgcgactttctgacggaatggcgccgtgtgagtaaggcaccggaggcccttttctttgtgcaatttgagaagggagagagctacttccacatgcacgtgctcgtggaaaccaccggggtgaaatccatggttttgggacgtttcctgagtcagattcgcgaaaaactgattcagagaatttaccgcgggatcgagccgactttgccaaactggttcgcggtcacaaagaccagaaatggcgccggaggcgggaacaaggtggtggatgagtgctacatccccaattacttgctccccaaaacccagcctgagctccagtgggcgtggactaatatggaacagtatttaagcgcctgtttgaatctcacggagcgtaaacggttggtggcgcagcatctgacgcacgtgtcgcagacgcaggagcagaacaaagagaatcagaatcccaattctgatgcgccggtgatcagatcaaaaacttcagccaggtacatggagctggtcgggtggctcgtggacaaggggattacctcggagaagcagtggatccaggaggaccaggcctcatacatctccttcaatgcggcctccaactcgcggtcccaaatcaaggctgccttggacaatgcgggaaagattatgagcctgactaaaaccgcccccgactacctggtgggccagcagcccgtggaggacatttccagcaatcggatttataaaattttggaactaaacgggtacgatccccaatatgcggcttccgtctttctgggatgggccacgaaaaagttcggcaagaggaacaccatctggctgtttgggcctgcaactaccgggaagaccaacatcgcggaggccatagcccacactgtgcccttctacgggtgcgtaaactggaccaatgagaactttcccttcaacgactgtgtcgacaagatggtgatctggtgggaggaggggaagatgaccgccaaggtcgtggagtcggccaaagccattctcggaggaagcaaggtgcgcgtggaccagaaatgcaagtcctcggcccagatagacccgactcccgtgatcgtcacctccaacaccaacatgtgcgccgtgattgacgggaactcaacgaccttcgaacaccagcagccgttgcaagaccggatgttcaaatttgaactcacccgccgtctggatcatgactttgggaaggtcaccaagcaggaagtcaaagactttttccggtgggcaaaggatcacgtggttgaggtggagcatgaattctacgtcaaaaagggtggagccaagaaaagacccgcccccagtgacgcagatataagtgagcccaaacgggtgcgcgagtcagttgcgcagccatcgacgtcagacgcggaagcttcgatcaactacgcagacaggtaccaaaacaaatgttctcgtcacgtgggcatgaatctgatgctgtttccctgcagacaatgcgagagaatgaatcagaattcaaatatctgcttcactcacggacagaaagactgtttagagtgctttcccgtgtcagaatctcaacccgtttctgtcgtcaaaaaggcgtatcagaaactgtgctacattcatcatatcatgggaaaggtgccagacgcttgcactgcctgcgatctggtcaatgtggatttggatgactgcatctttgaacaataaatgatttaaatcaggtatggctgccgatggttatcttccagattggctcgaggacactctctctgaaggaataagacagtggtggaagctcaaacctggcccaccaccaccaaagcccgcagagcggcataaggacgacagcaggggtcttgtgcttcctgggtacaagtacctcggacccttcaacggactcgacaagggagagccggtcaacgaggcagacgccgcggccctcgagcacgacaaagcctacgaccggcagctcgacagcggagacaacccgtacctcaagtacaaccacgccgacgcggagtttcaggagcgccttaaagaagatacgtcttttgggggcaacctcggacgagcagtcttccaggcgaaaaagagggttcttgaacctctgggcctggttgaggaacctgttaagacggctccgggaaaaaagaggccggtagagcactctcctgtggagccagactcctcctcgggaaccggaaaggcgggccagcagcctgcaagaaaaagattgaattttggtcagactggagacgcagactcagtacctgacccccagcctctcggacagccaccagcagccccctctggtctgggaactaatacgatggctacaggcagtggcgcaccaatggcagacaataacgagggcgccgacggagtgggtaattcctcgggaaattggcattgcgattccacatggatgggcgacagagtcatcaccaccagcacccgaacctgggccctgcccacctacaacaaccacctctacaaacaaatttccagccaatcaggagcctcgaacgacaatcactactttggctacagcaccccttgggggtattttgacttcaacagattccactgccacttttcaccacgtgactggcaaagactcatcaacaacaactggggattccgacccaagagactcaacttcaagctctttaacattcaagtcaaagaggtcacgcagaatgacggtacgacgacgattgccaataaccttaccagcacggttcaggtgtttactgactcggagtaccagctcccgtacgtcctcggctcggcgcatcaaggatgcctcccgccgttcccagcagacgtcttcatggtgccacagtatggatacctcaccctgaacaacgggagtcaggcagtaggacgctcttcattttactgcctggagtactttccttctcagatgctgcgtaccggaaacaactttaccttcagctacacttttgaggacgttcctttccacagcagctacgctcacagccagagtctggaccgtctcatgaatcctctcatcgaccagtacctgtattacttgagcagaacaaacactccaagtggaaccaccacgcagtcaaggcttcagttttctcaggccggagcgagtgacattcgggaccagtctaggaactggcttcctggaccctgttaccgccagcagcgagtatcaaagacatctgcggataacaacaacagtgaatactcgtggactggagctaccaagtaccacctcaatggcagagactctctggtgaatccgggcccggccatggcaagccacaaggacgatgaagaaaagttttttcctcagagcggggttctcatctttgggaagcaaggctcagagaaaacaaatgtggacattgaaaaggtcatgattacagacgaagaggaaatcaggacaaccaatcccgtggctacggagcagtatggttctgtatctaccaacctccagagaggccagagaggcgagtctggtcatggttattttgcccaggcggccaccgcagatgtcaacacacaaggcgttcttccaggcatggtctggcaggacagagatgtgtaccttcaggggcccatctgggcaaagattccacacacggacggacattttcacccctctcccctcatgggtggattcggacttaaacaccctcctccacagattctcatcaagaacaccccggtacctgcgaatccttcgaccaccttcagtgcggcaaagtttgcttccttcatcacacagtactccacgggacaggtcagcgtggagatcgagtgggagctgcagaaggaaaacagcaaacgctggaatcccgaaattcagtacacttccaactacaacaagtctgttaatgtggactttactgtggacactaatggcgtgtattcagagcctcgccccattggcaccagatacctgactcgtaatctgtaattgcttgttaatcaataaaccgtttaattcgtttcagttgaactttggtctctgcgtatttctttcttatctagtttccatgctctagaggtcctgtattagaggtcacgtgagtgttttgcgacattttgcgacaccatgtggtcacgctgggtatttaagcccgagtgagcacgcagggtctccattttgaagcgggaggtttgaacgcgcagccaccacggcggggttttacgagattgtgattaaggtccccagcgaccttgacgagcatctgcccggcatttctgacagctttgtgaactgggtggccgagaaggaatgggagttgccgccagattctgacatggatctgaatctgattgagcaggcacccctgaccgtggccgagaagctgcatcgctggcgtaatagcgaagaggcccgcaccgatcgcccttcccaacagttgcgcagcctgaatggcgaatggcgattccgttgcaatggctggcggtaatattgttctggatattaccagcaaggccgatagtttgagttcttctactcaggcaagtgatgttattactaatcaaagaagtattgcgacaacggttaatttgcgtgatggacagactcttttactcggtggcctcactgattataaaaacacttctcaggattctggcgtaccgttcctgtctaaaatccctttaatcggcctcctgtttagctcccgctctgattctaacgaggaaagcacgttatacgtgctcgtcaaagcaaccatagtacgcgccctgtagcggcgcattaagcgcggcgggtgtggtggttacgcgcagcgtgaccgctacacttgccagcgccctagcgcccgctcctttcgctttcttcccttcctttctcgccacgttcgccggctttccccgtcaagctctaaatcgggggctccctttagggttccgatttagtgctttacggcacctcgaccccaaaaaacttgattagggtgatggttcacgtagtgggccatcgccctgatagacggtttttcgccctttgacgttggagtccacgttctttaatagtggactcttgttccaaactggaacaacactcaaccctatctcggtctattcttttgatttataagggattttgccgatttcggcctattggttaaaaaatgagctgatttaacaaaaatttaacgcgaattttaacaaaatattaacgtttacaatttaaatatttgcttatacaatcttcctgtttttggggcttttctgattatcaaccggggtacatatgattgacatgctagttttacgattaccgttcatcgattctcttgtttgctccagactctcaggcaatgacctgatagcctttgtagagacctctcaaaaatagctaccctctccggcatgaatttatcagctagaacggttgaatatcatattgatggtgatttgactgtctccggcctttctcacccgtttgaatctttacctacacattactcaggcattgcatttaaaatatatgagggttctaaaaatttttatccttgcgttgaaataaaggcttctcccgcaaaagtattacagggtcataatgtttttggtacaaccgatttagctttatgctctgaggctttattgcttaattttgctaattctttgccttgcctgtatgatttattggatgttggaattcctgatgcggtattttctccttacgcatctgtgcggtatttcacaccgcatatggtgcactctcagtacaatctgctctgatgccgcatagttaagccagccccgacacccgccaacacccgctgacgcgccctgacgggcttgtctgctcccggcatccgcttacagacaagctgtgaccgtctccgggagctgcatgtgtcagaggttttcaccgtcatcaccgaaacgcgcgagacgaaagggcctcgtgatacgcctatttttataggttaatgtcatgataataatggtttcttagacgtcaggtggcacttttcggggaaatgtgcgcggaacccctatttgtttatttttctaaatacattcaaatatgtatccgctcatgagacaataaccctgataaatgcttcaataatattgaaaaaggaagagtatgagtattcaacatttccgtgtcgcccttattcccttttttgcggcattttgccttcctgtttttgctcacccagaaacgctggtgaaagtaaaagatgctgaagatcagttgggtgcacgagtgggttacatcgaactggatctcaacagcggtaagatccttgagagttttcgccccgaagaacgttttccaatgatgagcacttttaaagttctgctatgtggcgcggtattatcccgtattgacgccgggcaagagcaactcggtcgccgcatacactattctcagaatgacttggttgagtactcaccagtcacagaaaagcatcttacggatggcatgacagtaagagaattatgcagtgctgccataaccatgagtgataacactgcggccaacttacttctgacaacgatcggaggaccgaaggagctaaccgcttttttgcacaacatgggggatcatgtaactcgccttgatcgttgggaaccggagctgaatgaagccataccaaacgacgagcgtgacaccacgatgcctgtagcaatggcaacaacgttgcgcaaactattaactggcgaactacttactctagcttcccggcaacaattaatagactggatggaggcggataaagttgcaggaccacttctgcgctcggcccttccggctggctggtttattgctgataaatctggagccggtgagcgtgggtctcgcggtatcattgcagcactggggccagatggtaagccctcccgtatcgtagttatctacacgacggggagtcaggcaactatggatgaacgaaatagacagatcgctgagataggtgcctcactgattaagcattggtaactgtcagaccaagtttactcatatatactttagattgatttaaaacttcatttttaatttaaaaggatctaggtgaagatcctttttgataatctcatgaccaaaatcccttaacgtgagttttcgttccactgagcgtcagaccccgtagaaaagatcaaaggatcttcttgagatcctttttttctgcgcgtaatctgctgcttgcaaacaaaaaaaccaccgctaccagcggtggtttgtttgccggatcaagagctaccaactctttttccgaaggtaactggcttcagcagagcgcagataccaaatactgtccttctagtgtagccgtagttaggccaccacttcaagaactctgtagcaccgcctacatacctcgctctgctaatcctgttaccagtggctgctgccagtggcgataagtcgtgtcttaccgggttggactcaagacgatagttaccggataaggcgcagcggtcgggctgaacggggggttcgtgcacacagcccagcttggagcgaacgacctacaccgaactgagatacctacagcgtgagctatgagaaagcgccacgcttcccgaagggagaaaggcggacaggtatccggtaagcggcagggtcggaacaggagagcgcacgagggagcttccagggggaaacgcctggtatctttatagtcctgtcgggtttcgccacctctgacttgagcgtcgatttttgtgatgctcgtcaggggggcggagcctatggaaaaacgccagcaacgcggcctttttacggttcctggccttttgctggccttttgctcacatgttctttcctgcgttatcccctgattctgtggataaccgtattaccgcctttgagtgagctgataccgctcgccgcagccgaacgaccgagcgcagcgagtcagtgagcgaggaagcggaagagcgcccaatacgcaaaccgcctctccccgcgcgttggccgattcattaatgcagaattcc

SEQ ID NO: 912 - protein, 736 aa, synthetic construct
  VARIANT 168: note = /replace="Arg" - can be Arg
  VARIANT 204: note = /replace="Ser" - can be Ser
  VARIANT 266: note = /replace="Gly" - can be Gly
  VARIANT 311: note = /replace="Lys" - can be Lys
  VARIANT 411: note = /replace="Gln" - can be Gln
  VARIANT 460: note = /replace="Glu" - can be Glu
  VARIANT 493: note = /replace="Thr" - can be Thr
  VARIANT 562: note = /replace="Asn" - can be Asn
  VARIANT 576: note = /replace="Glu" - can be Glu
  VARIANT 587: note = /replace="Ala" - can be Ala
  VARIANT 609: note = /replace="Asp
  REGION 1..736: note = SITE - /note="Variant residues given in the sequence have no preference with respect to those in the annotations for variant positions"
  REGION 1..736: note = source = /note="Description of Artificial Sequence: Synthetic polypeptide"
MAADGYLPDWLEDNLSEGIREWWDLKPGAPKPKANQQKQDDGRGLVLPGYKYLGPFNGLDKGEPVNAADAAALEHDKAYDQQLKAGDNPYLRYNHADAEFQERLQEDTSFGGNLGRAVFQAKKRVLEPLGLVEEGAKTAPGKKRPVEQSPQEPDSSSGIGKKGQQPAKKRLNFGQTGDSESVPDPQPLGEPPAAPSGVGSNTMAAGGGAPMADNNEGADGVGNASGNWHCDSTWLGDRVITTSTRTWALPTYNNHLYKQISSQSGASTNDNTYFGYSTPWGYFDFNRFHCHFSPRDWQRLINNNWGFRPKRLNFKLFNIQVKEVTTNDGTTTIANNLTSTVQVFTDSEYQLPYVLGSAHQGCLPPFPADVFMIPQYGYLTLNNGSQAVGRSSFYCLEYFPSQMLRTGNNFEFSYTFEDVPFHSSYAHSQSLDRLMNPLIDQYLYYLSRTQTTSGTAGNRTLQFSQAGPSSMANQAKNWLPGPCYRQQRVSKTANQNNNSNFAWTGATKYHLNGRDSLVNPGPAMATHKDDEDKFFPMSGVLIFGKQGAGNSNVDLDNVMITSEEEIKTTNPVATEQYGTVATNLQSSNTAPATGTVNSQGALPGMVWQNRDVYLQGPIWAKIPHTDGHFHPSPLMGGFGLKHPPPQILIKNTPVPANPPTTFSPAKFASFITQYSTGQVSVEIEWELQKENSKRWNPEIQYTSNYNKSTNVDFAVDTNGVYSEPRPIGTRYLTRNL

SEQ ID NO: 913 - DNA, 2208 bp, synthetic construct
  misc_difference 502..504: note = variation - /replace="agg" - can be agg
  misc_difference 610..612: note = variation - /replace="agc" - can be agc
  misc_difference 796..798: note = variation - /replace="ggc" - can be ggc
  misc_difference 931..933: note = variation - /replace="aag" - can be aag
  misc_difference 1231..1233: note = variation - /replace="cag" - can be cag
  misc_difference 1378..1380: note = variation - /replace="gag" - can be gag
  misc_difference 1477..1479: note = variation - /replace="acc" - can be acc
  misc_difference 1684..1686: note = variation - /replace="aac" - can be aac
  misc_difference 1726..1728: note = variation - /replace="gag" - can be gag
  misc_difference 1759..1761: note = variation - /replace="gcc" - can be gcc
  misc_difference 1825..1827: note = variation - /replace="gac" - can be gac
  misc_feature 1..2208: note = /note="Variant residues given in the sequence have no preference with respect to those in the annotations for variant positions"
  misc_feature 1..2208: note = source = /note="Description of Artificial Sequence: Synthetic polynucleotide"
  source 1..2208: mol_type = other DNA
atggctgccgatggttatcttccagattggctcgaggacaacctctctgagggcattcgcgagtggtgggacttgaaacctggagccccgaaacccaaagccaaccagcaaaagcaggacgacggccggggtctggtgcttcctggctacaagtacctcggacccttcaacggactcgacaagggggagcccgtcaacgcggcggacgcagcggccctcgagcacgacaaggcctacgaccagcagctcaaagcgggtgacaatccgtacctgcggtataaccacgccgacgccgagtttcaggagcgtctgcaagaagatacgtcttttgggggcaacctcgggcgagcagtcttccaggccaagaagcgggttctcgaacctctcggtctggttgaggaaggcgctaagacggctcctggaaagaagagaccggtagagcaatcaccccaggaaccagactcctcttcgggcatcggcaagaaaggccagcagcccgcgaagaagagactcaactttgggcagacaggcgactcagagtcagtgcccgaccctcaaccactcggagaaccccccgcagccccctctggtgtgggatctaatacaatggcagcaggcggtggcgctccaatggcagacaataacgaaggcgccgacggagtgggtaacgcctcaggaaattggcattgcgattccacatggctgggcgacagagtcatcaccaccagcacccgaacctgggccctccccacctacaacaaccacctctacaagcaaatctccagccaatcgggagcaagcaccaacgacaacacctacttcggctacagcaccccctgggggtattttgactttaacagattccactgccacttctcaccacgtgactggcagcgactcatcaacaacaactggggattccggcccaagagactcaacttcaagctcttcaacatccaggtcaaggaggtcacgacgaatgatggcaccacgaccatcgccaataaccttaccagcacggttcaggtctttacggactcggaataccagctcccgtacgtcctcggctctgcgcaccagggctgcctgcctccgttcccggcggacgtcttcatgattcctcagtacgggtacctgactctgaacaatggcagtcaggccgtgggccgttcctccttctactgcctggagtactttccttctcaaatgctgagaacgggcaacaactttgagttcagctacacgtttgaggacgtgccttttcacagcagctacgcgcacagccaaagcctggaccggctgatgaaccccctcatcgaccagtacctgtactacctgtctcggactcagaccacgagtggtaccgcaggaaatcggacgttgcaattttctcaggccgggcctagtagcatggcgaatcaggccaaaaactggctacccgggccctgctaccggcagcaacgcgtctccaagacagcgaatcaaaataacaacagcaactttgcctggaccggtgccaccaagtatcatctgaatggcagagactctctggtaaatcccggtcccgctatggcaacccacaaggacgacgaagacaaattttttccgatgagcggagtcttaatatttgggaaacagggagctggaaatagcaacgtggaccttgacaacgttatgataaccagtgaggaagaaattaaaaccaccaacccagtggccacagaacagtacggcacggtggccactaacctgcaatcgtcaaacaccgctcctgctacagggaccgtcaacagtcaaggagccttacctggcatggtctggcagaaccgggacgtgtacctgcagggtcctatctgggccaagattcctcacacggacggacactttcatccctcgccgctgatgggaggctttggactgaaacacccgcctcctcagatcctgattaagaatacacctgttcccgcgaatcctccaactaccttcagtccagctaagtttgcgtcgttcatcacgcagtacagcaccggacaggtcagcgtggaaattgaatgggagctgcagaaagaaaacagcaaacgctggaacccagagattcaatacacttccaactacaacaaatctacaaatgtggactttgctgttgacacaaatggcgtttattctgagcctcgccccatcggcacccgttacctcacccgtaatctg

SEQ ID NO: 914 - protein, 737 aa, synthetic construct
  VARIANT 157: note = /replace="Ser" - can be Ser
  VARIANT 168: note = /replace="Arg" - can be Arg
  VARIANT 262: note = /replace="Ser" - can be Ser
  VARIANT 263: note = /replace="His" - can be His
  VARIANT 312: note = /replace="Lys" - can be Lys
  VARIANT 412: note = /replace="Gln" - can be Gln
  VARIANT 460: note = /replace="Gln" - can be Gln
  VARIANT 461: note = /replace="Glu" - can be Glu
  VARIANT 552: note = /replace="Ser" - can be Ser
  VARIANT 556: note = /replace="Tyr" - can be Tyr
  VARIANT 557: note = /replace="Ser" - can be Ser
  VARIANT 563: note = /replace="Asn" - can be Asn
  VARIANT 580: note = /replace="Ile" - can be Ile
  VARIANT 588: note = /replace="Ser" - can be Ser
  VARIANT 664: note = /replace="Thr
  REGION 1..737: note = SITE - /note="Variant residues given in the sequence have no preference with respect to those in the annotations for variant positions"
  REGION 1..737: note = source = /note="Description of Artificial Sequence: Synthetic polypeptide"
MAADGYLPDWLEDNLSEGIREWWDLKPGAPKPKANQQKQDDGRGLVLPGYKYLGPFNGLDKGEPVNAADAAALEHDKAYDQQLKAGDNPYLRYNHADAEFQERLQEDTSFGGNLGRAVFQAKKRVLEPLGLVEEGAKTAPGKKRPVEQSPQEPDSSTGIGKKGQQPAKKRLNFGQTGDSESVPDPQPLGEPPAAPSGVGSNTMAAGGGAPMADNNEGADGVGNASGNWHCDSTWLGDRVITTSTRTWALPTYNNHLYKQISNSQSGGSTNDNTYFGYSTPWGYFDFNRFHCHFSPRDWQRLINNNWGFRPKRLNFKLFNIQVKEVTTNDGTTTIANNLTSTVQVFTDSEYQLPYVLGSAHQGCLPPFPADVFMIPQYGYLTLNNGSQAVGRSSFYCLEYFPSQMLRTGNNFEFSYTFEDVPFHSSYAHSQSLDRLMNPLIDQYLYYLSRTQTTGGTAGNRTLQFSQAGPSSMANQAKNWLPGPCYRQQRVSKTTNQNNNSNFAWTGATKYHLNGRDSLVNPGVAMATHKDDEDRFFPSSGVLIFGKQGAGNDNVDLDNVMITSEEEIKTTNPVATEEYGVVATNLQSANTAPQTGTVNSQGALPGMVWQNRDVYLQGPIWAKIPHTDGNFHPSPLMGGFGLKHPPPQILIKNTPVPANPPTTFSPAKFASFITQYSTGQVSVEIEWELQKENSKRWNPEIQYTSNYNKSTNVDFAVDTEGVYSEPRPIGTRYLTRNL

SEQ ID NO: 915 - DNA, 2211 bp, synthetic construct
  misc_difference 469..471: note = variation - /replace="agc" - can be agc
  misc_difference 502..504: note = variation - /replace="aga" - can be aga
  misc_difference 784..786: note = variation - /replace="agt" - can be agt
  misc_difference 787..789: note = variation - /replace="cac" - can be cac
  misc_difference 934..936: note = variation - /replace="aag" - can be aag
  misc_difference 1234..1236: note = variation - /replace="cag" - can be cag
  misc_difference 1378..1380: note = variation - /replace="cag" - can be cag
  misc_difference 1381..1383: note = variation - /replace="gag" - can be gag
  misc_difference 1654..1656: note = variation - /replace="agc" - can be agc
  misc_difference 1666..1668: note = variation - /replace="tac" - can be tac
  misc_difference 1669..1671: note = variation - /replace="agc" - can be agc
  misc_difference 1687..1689: note = variation - /replace="aac" - can be aac
  misc_difference 1738..1740: note = variation - /replace="atc" - can be atc
  misc_difference 1762..1764: note = variation - /replace="agc" - can be agc
  misc_difference 1990..1992: note = variation - /replace="acc" - can be acc
  misc_feature 1..2211: note = /note="Variant residues given in the sequence have no preference with respect to those in the annotations for variant positions"
  misc_feature 1..2211: note = source = /note="Description of Artificial Sequence: Synthetic polynucleotide"
  source 1..2211: mol_type = other DNA
atggctgccgatggttatcttccagattggctcgaggacaacctctctgagggcattcgcgagtggtgggacttgaaacctggagccccgaaacccaaagccaaccagcaaaagcaggacgacggccggggtctggtgcttcctggctacaagtacctcggacccttcaacggactcgacaagggggagcccgtcaacgcggcggacgcagcggccctcgagcacgacaaggcctacgaccagcagctcaaagcgggtgacaatccgtacctgcggtataaccacgccgacgccgagtttcaggagcgtctgcaagaagatacgtcttttgggggcaacctcgggcgagcagtcttccaggccaagaagcgggttctcgaacctctcggtctggttgaggaaggcgctaagacggctcctggaaagaagagaccggtagagcaatcaccccaggaaccagactcctctacgggcatcggcaagaaaggccagcagcccgcgaaaaagagactcaactttgggcagactggcgactcagagtcagtgcccgaccctcaaccactcggagaaccccccgcagccccctctggtgtgggatctaatacaatggctgcaggcggtggcgctccaatggcagacaataacgaaggcgccgacggagtgggtaatgcctcaggaaattggcattgcgattccacatggctgggcgacagagtcatcaccaccagcacccgaacctgggccctccccacctacaacaaccacctctacaagcaaatctccaacagccaatcgggaggaagcaccaacgacaacacctacttcggctacagcaccccctgggggtattttgactttaacagattccactgccacttctcaccacgtgactggcagcgactcatcaacaacaactggggattccggcccaagagactcaacttcaagctcttcaacatccaggtcaaggaggtcacgacgaatgatggcaccacgaccatcgccaataaccttaccagcacggttcaggtctttacggactcggaataccagctcccgtacgtcctcggctctgcgcaccagggctgcctgcctccgttcccggcggacgtcttcatgattcctcagtacgggtacctgactctgaacaatggcagtcaggccgtgggccgttcctccttctactgcctggagtactttccttctcaaatgctgagaacgggcaacaactttgagttcagctacacgtttgaggacgtgccttttcacagcagctacgcgcacagccaaagcctggaccggctgatgaaccccctcatcgaccagtacctgtactacctgtctcggactcagaccacgggaggtaccgcaggaaatcggacgttgcaattttctcaggccgggcctagtagcatggcgaatcaggccaaaaactggctacccgggccctgctaccggcagcaacgcgtctccaagacaacgaatcaaaataacaacagcaactttgcctggaccggtgccaccaagtatcatctgaatggcagagactctctggtaaatcccggtgtcgctatggcaacccacaaggacgacgaagaccgattttttccgtccagcggagtcttaatatttgggaaacagggagctggaaatgacaacgtggaccttgacaacgttatgataaccagtgaggaagaaattaaaaccaccaacccagtggccacagaagagtacggcgtggtggccactaacctgcaatcggcaaacaccgctcctcaaacagggaccgtcaacagtcaaggagccttacctggcatggtctggcagaaccgggacgtgtacctgcagggtcctatctgggccaagattcctcacacggacggaaactttcatccctcgccgctgatgggaggctttggactgaaacacccgcctcctcagatcctgattaagaatacacctgttcccgcgaatcctccaactaccttcagtccagctaagtttgcgtcgttcatcacgcagtacagcaccggacaggtcagcgtggaaattgaatgggagctgcagaaagaaaacagcaaacgctggaacccagagattcaatacacttccaactacaacaaatctacaaatgtggactttgctgttgacacagaaggcgtttattctgagcctcgccccatcggcacccgttacctcacccgtaatctg

SEQ ID NO: 916 - protein, 738 aa, synthetic construct
  VARIANT 158: note = /replace="Ser" - can be Ser
  VARIANT 169: note = /replace="Arg" - can be Arg
  VARIANT 564: note = /replace="Asn
  REGION 1..738: note = SITE - /note="Variant residues given in the sequence have no preference with respect to those in the annotations for variant positions"
  REGION 1..738: note = source = /note="Description of Artificial Sequence: Synthetic polypeptide"
MAADGYLPDWLEDNLSEGIREWWDLKPGAPKPKANQQKQDDGRGLVLPGYKYLGPFNGLDKGEPVNAADAAALEHDKAYDQQLKAGDNPYLRYNHADAEFQERLQEDTSFGGNLGRAVFQAKKRVLEPLGLVEEGAKTAPGKKRPVEQSPQREPDSSTGIGKKGQQPAKKRLNFGQTGDSESVPDPQPLGEPPAAPSGVGSNTMAAGGGAPMADNNEGADGVGNSSGNWHCDSTWLGDRVITTSTRTWALPTYNNHLYKQISNGTSGGSTNDNTYFGYSTPWGYFDFNRFHCHFSPRDWQRLINNNWGFRPKRLNFKLFNIQVKEVTTNEGTKTIANNLTSTVQVFTDSEYQLPYVLGSAHQGCLPPFPADVFMIPQYGYLTLNNGSQAVGRSSFYCLEYFPSQMLRTGNNFQFSYTFEDVPFHSSYAHSQSLDRLMNPLIDQYLYYLSRTQTTGGTAGTQTLQFSQAGPSSMANQAKNWLPGPCYRQQRVSTTTNQNNNSNFAWTGATKYHLNGRDSLVNPGVAMATHKDDEDRFFPSSGVLIFGKQGAGNDNVDYSNVMITSEEEIKTTNPVATEEYGVVATNLQSANTAPQTGTVNSQGALPGMVWQNRDVYLQGPIWAKIPHTDGNFHPSPLMGGFGLKHPPPQILIKNTPVPADPPTTFNQAKLNSFITQYSTGQVSVEIEWELQKENSKRWNPEIQYTSNYYKSTNVDFAVNTEGVYSEPRPIGTRYLTRNL

SEQ ID NO: 917 - DNA, 2214 bp, synthetic construct
  misc_difference 472..474: note = variation - /replace="agc" - can be agc
  misc_difference 505..507: note = variation - /replace="aga" - can be aga
  misc_difference 1690..1692: note = variation - /replace="aac" - can be aac
  misc_feature 1..2214: note = /note="Variant residues given in the sequence have no preference with respect to those in the annotations for variant positions"
  misc_feature 1..2214: note = source = /note="Description of Artificial Sequence: Synthetic polynucleotide"
  source 1..2214: mol_type = other DNA
atggctgccgatggttatcttccagattggctcgaggacaacctctctgagggcattcgcgagtggtgggacctgaaacctggagccccgaaacccaaagccaaccagcaaaagcaggacgacggccggggtctggtgcttcctggctacaagtacctcggacccttcaacggactcgacaagggggagcccgtcaacgcggcggacgcagcggccctcgagcacgacaaggcctacgaccagcagctcaaagcgggtgacaatccgtacctgcggtataatcacgccgacgccgagtttcaggagcgtctgcaagaagatacgtcttttgggggcaacctcgggcgagcagtcttccaggccaagaagcgggttctcgaacctctcggtctggttgaggaaggcgctaagacggctcctggaaagaagagaccggtagagcagtcaccacagcgtgagcccgactcctccacgggcatcggcaagaaaggccagcagcccgccaaaaagagactcaatttcggtcagactggcgactcagagtcagtccccgaccctcaacctctcggagaacctccagcagcgccctctggtgtgggatctaatacaatggctgcaggcggtggcgcaccaatggcagacaataacgaaggtgccgacggagtgggtaattcctcgggaaattggcattgcgattccacatggctgggcgacagagtcatcaccaccagcacccgaacctgggccctgcccacctacaacaaccacctctacaagcaaatctccaacgggacctcgggaggcagcaccaacgacaacacctactttggctacagcaccccctgggggtattttgactttaacagattccactgccacttctcaccacgtgactggcagcgactcatcaacaacaactggggattccggcccaagagactcaacttcaagctcttcaacatccaggtcaaagaggtcacgacgaatgaaggcaccaagaccatcgccaataacctcaccagcaccgtccaggtgtttacggactcggaataccagctgccgtacgtcctcggctctgcccaccagggctgcctgcctccgttcccggcggacgtcttcatgattcctcagtacggctacctgactctcaacaacggtagtcaggccgtgggacgttcctccttctactgcctggagtacttcccctctcagatgctgagaacgggcaacaactttcaattcagctacactttcgaggacgtgcctttccacagcagctacgcgcacagccagagtttggacaggctgatgaatcctctcatcgaccagtacctgtactacctgtcaagaacccagactacgggaggcacagcgggaacccagacgttgcagttttctcaggccgggcctagcagcatggcgaatcaggccaaaaactggctgcctggaccctgctacagacagcagcgcgtctccacgacaacgaatcaaaacaacaacagcaactttgcctggactggtgccaccaagtatcatctgaacggcagagactctctggtgaatccgggcgtcgccatggcaacccacaaggacgacgaggaccgcttcttcccatccagcggcgtcctcatatttggcaagcagggagctggaaatgacaacgtggactatagcaacgtgatgataaccagcgaggaagaaatcaagaccaccaaccccgtggccacagaagagtatggcgtggtggctactaacctacagtcggcaaacaccgctcctcaaacggggaccgtcaacagccagggagccttacctggcatggtctggcagaaccgggacgtgtacctgcagggtcctatttgggccaagattcctcacacagatggcaactttcacccgtctcctttaatgggcggctttggacttaaacatccgcctcctcagatcctcatcaaaaacactcctgttcctgcggatcctccaacaacgttcaaccaggccaagctgaattctttcatcacgcagtacagcaccggacaagtcagcgtggagatcgagtgggagctgcagaaggagaacagcaagcgctggaacccagagattcagtatacttccaactactacaaatctacaaatgtggactttgctgttaatactgagggtgtttactctgagcctcgccccattggcactcgttacctcacccgtaatctg

SEQ ID NO: 918 - protein, 738 aa, synthetic construct
  VARIANT 158: note = /replace="Ser" - can be Ser
  VARIANT 169: note = /replace="Lys" - can be Lys
  VARIANT 315: note = /replace="Ser" - can be Ser
  VARIANT 413: note = /replace="Glu" - can be Glu
  VARIANT 472: note = /replace="Thr" or "Ser" - can be Thr" or "Ser
  VARIANT 534: note = /replace="Glu" - can be Glu
  VARIANT 542: note = /replace="Val" - can be Val
  VARIANT 595: note = /replace="Val
  REGION 1..738: note = SITE - /note="Variant residues given in the sequence have no preference with respect to those in the annotations for variant positions"
  REGION 1..738: note = source = /note="Description of Artificial Sequence: Synthetic polypeptide"
MAADGYLPDWLEDNLSEGIREWWDLKPGAPKPKANQQKQDDGRGLVLPGYKYLGPFNGLDKGEPVNAADAAALEHDKAYDQQLKAGDNPYLRYNHADAEFQERLQEDTSFGGNLGRAVFQAKKRVLEPLGLVEEGAKTAPGKKRPVEQSPQREPDSSTGIGKKGQQPARKRLNFGQTGDSESVPDPQPLGEPPAAPSGVGSNTMAAGGGAPMADNNEGADGVGSSSGNWHCDSTWLGDRVITTSTRTWALPTYNNHLYKQISNGTSGGSTNDNTYFGYSTPWGYFDFNRFHCHFSPRDWQRLINNNWGFRPKRLNFKLFNIQVKEVTQNEGTKTIANNLTSTIQVFTDSEYQLPYVLGSAHQGCLPPFPADVFMIPQYGYLTLNNGSQAVGRSSFYCLEYFPSQMLRTGNNFQFSYTFEDVPFHSSYAHSQSLDRLMNPLIDQYLYYLSRTQTTGGTAGTQTLQFSQAGPSNMANQAKNWLPGPCYRQQRVSTTTSQNNNSNFAWTGATKYHLNGRDSLVNPGVAMATHKDDEDRFFPSSGILIFGKQGAGKDNVDYSNVMLTSEEEIKTTNPVATEEYGVVADNLQQQNTAPQIGTVNSQGALPGMVWQNRDVYLQGPIWAKIPHTDGNFHPSPLMGGFGLKHPPPQILIKNTPVPADPPTTFNQAKLNSFITQYSTGQVSVEIEWELQKENSKRWNPEIQYTSNYYKSTNVDFAVNTEGVYSEPRPIGTRYLTRNL

SEQ ID NO: 919 - DNA, 2214 bp, synthetic construct
  misc_difference 472..474: note = variation - /replace="agc" - can be agc
  misc_difference 505..507: note = variation - /replace="aag" - can be aag
  misc_difference 943..945: note = variation - /replace="agc" - can be agc
  misc_difference 1237..1239: note = variation - /replace="gaa" - can be gaa
  misc_difference 1414..1416: note = variation - /replace="aac" or "agc" - can be aac" or "agc
  misc_difference 1600..1602: note = variation - /replace="gag" - can be gag
  misc_difference 1624..1626: note = variation - /replace="gtc" - can be gtc
  misc_difference 1783..1785: note = variation - /replace="gta" - can be gta
  misc_feature 1..2214: note = /note="Variant residues given in the sequence have no preference with respect to those in the annotations for variant positions"
  misc_feature 1..2214: note = source = /note="Description of Artificial Sequence: Synthetic polynucleotide"
  source 1..2214: mol_type = other DNA
atggctgccgatggttatcttccagattggctcgaggacaacctctctgagggcattcgcgagtggtgggacctgaaacctggagccccgaaacccaaagccaaccagcaaaagcaggacgacggccggggtctggtgcttcctggctacaagtacctcggacccttcaacggactcgacaagggggagcccgtcaacgcggcggacgcagcggccctcgagcacgacaaggcctacgaccagcagctcaaagcgggtgacaatccgtacctgcggtataatcacgccgacgccgagtttcaggagcgtctgcaagaagatacgtcttttgggggcaacctcgggcgagcagtcttccaggccaagaagcgggttctcgaacctctcggtctggttgaggaaggcgctaagacggctcctggaaagaagagaccggtagagcagtcaccacagcgtgagcccgactcctccacgggcatcggcaagaaaggccagcagcccgccagaaagagactcaatttcggtcagactggcgactcagagtcagtccccgaccctcaacctctcggagaacctccagcagcgccctctggtgtgggatctaatacaatggctgcaggcggtggcgcaccaatggcagacaataacgaaggtgccgacggagtgggtagttcctcgggaaattggcattgcgattccacatggctgggcgacagagtcatcaccaccagcacccgaacctgggccctgcccacctacaacaaccacctctacaagcaaatctccaacgggacctcgggaggcagcaccaacgacaacacctactttggctacagcaccccctgggggtattttgactttaacagattccactgccacttctcaccacgtgactggcagcgactcatcaacaacaactggggattccggcccaagagactcaacttcaagctcttcaacatccaggtcaaagaggtcacgcagaatgaaggcaccaagaccatcgccaataacctcaccagcaccatccaggtgtttacggactcggaataccagctgccgtacgtcctcggctctgcccaccagggctgcctgcctccgttcccggcggacgtcttcatgattcctcagtacggctacctgactctcaacaacggtagtcaggccgtgggacgttcctccttctactgcctggagtacttcccctctcagatgctgagaacgggcaacaactttcaattcagctacactttcgaggacgtgcctttccacagcagctacgcgcacagccagagtttggacaggctgatgaatcctctcatcgaccagtacctgtactacctgtcaagaacccagactacgggaggcacagcgggaacccagacgttgcagttttctcaggccgggcctagcaccatggcgaatcaggccaaaaactggctgcctggaccctgctacagacagcagcgcgtctccacgacaacgtcgcaaaacaacaacagcaactttgcctggactggtgccaccaagtatcatctgaacggcagagactctctggtgaatccgggcgtcgccatggcaacccacaaggacgacgaggaccgcttcttcccatccagcggcatcctcatatttggcaagcagggagctggaaaagacaacgtggactatagcaacgtgatgctaaccagcgaggaagaaatcaagaccaccaaccccgtggccacagaagagtatggcgtggtggctgataacctacagcagcaaaacaccgctcctcaaatagggaccgtcaacagccagggagccttacctggcatggtctggcagaaccgggacgtgtacctgcagggtcctatttgggccaagattcctcacacagatggcaactttcacccgtctcctttaatgggcggctttggacttaaacatccgcctcctcagatcctcatcaaaaacactcctgttcctgcggatcctccaacaacgttcaaccaggccaagctgaattctttcatcacgcagtacagcaccggacaagtcagcgtggagatcgagtgggagctgcagaaggagaacagcaagcgctggaacccagagattcagtatacttccaactactacaaatctacaaatgtggactttgctgttaatactgagggtgtttactctgagcctcgccccattggcactcgttacctcacccgtaatctg

SEQ ID NO: 920 - protein, 738 aa, synthetic construct
  VARIANT 169: note = /replace="Lys" - can be Lys
  VARIANT 315: note = /replace="Ser" - can be Ser
  VARIANT 534: note = /replace="Glu" - can be Glu
  VARIANT 542: note = /replace="Val
  REGION 1..738: note = SITE - /note="Variant residues given in the sequence have no preference with respect to those in the annotations for variant positions"
  REGION 1..738: note = source = /note="Description of Artificial Sequence: Synthetic polypeptide"
MAADGYLPDWLEDNLSEGIREWWDLKPGAPKPKANQQKQDDGRGLVLPGYKYLGPFNGLDKGEPVNAADAAALEHDKAYDQQLKAGDNPYLRYNHADAEFQERLQEDTSFGGNLGRAVFQAKKRVLEPLGLVEEGAKTAPGKKRPVEPSPQRSPDSSTGIGKKGQQPARKRLNFGQTGDSESVPDPQPIGEPPAAPSGVGSGTMAAGGGAPMADNNEGADGVGSSSGNWHCDSTWLGDRVITTSTRTWALPTYNNHLYKQISNGTSGGSTNDNTYFGYSTPWGYFDFNRFHCHFSPRDWQRLINNNWGFRPKRLNFKLFNIQVKEVTQNEGTKTIANNLTSTIQVFTDSEYQLPYVLGSAHQGCLPPFPADVFMIPQYGYLTLNNGSQAVGRSSFYCLEYFPSQMLRTGNNFEFSYTFEDVPFHSSYAHSQSLDRLMNPLIDQYLYYLSRTQSTGGTAGTQQLLFSQAGPSNMSAQAKNWLPGPCYRQQRVSTTLSQNNNSNFAWTGATKYHLNGRDSLVNPGVAMATHKDDEDRFFPSSGILMFGKQGAGKDNVDYSNVMLTSEEEIKTTNPVATEQYGVVADNLQQQNTAPIVGAVNSQGALPGMVWQNRDVYLQGPIWAKIPHTDGNFHPSPLMGGFGLKHPPPQILIKNTPVPADPPTTFNQAKLNSFITQYSTGQVSVEIEWELQKENSKRWNPEIQYTSNYYKSTNVDFAVNTEGVYSEPRPIGTRYLTRNL

SEQ ID NO: 921 - DNA, 2214 bp, synthetic construct
  misc_difference 505..507: note = variation - /replace="aaa" - can be aaa
  misc_difference 943..945: note = variation - /replace="agc" - can be agc
  misc_difference 1600..1602: note = variation - /replace="gag" - can be gag
  misc_difference 1624..1626: note = variation - /replace="gtc" - can be gtc
  misc_feature 1..2214: note = /note="Variant residues given in the sequence have no preference with respect to those in the annotations for variant positions"
  misc_feature 1..2214: note = source = /note="Description of Artificial Sequence: Synthetic polynucleotide"
  source 1..2214: mol_type = other DNA
atggctgccgatggttatcttccagattggctcgaggacaacctctctgagggcattcgcgagtggtgggacctgaaacctggagccccgaaacccaaagccaaccagcaaaagcaggacgacggccggggtctggtgcttcctggctacaagtacctcggacccttcaacggactcgacaagggggagcccgtcaacgcggcggacgcagcggccctcgagcacgacaaggcctacgaccagcagctcaaagcgggtgacaatccgtacctgcggtataatcacgccgacgccgagtttcaggagcgtctgcaagaagatacgtcttttgggggcaacctcgggcgagcagtcttccaggccaagaagcgggttctcgaacctctcggtctggttgaggaaggcgctaagacggctcctggaaagaagagaccggtagagccgtcaccacagcgttcccccgactcctccacgggcatcggcaagaaaggccagcagcccgccagaaagagactcaatttcggtcagactggcgactcagagtcagtccccgaccctcaacctatcggagaacctccagcagcgccctctggtgtgggatctggtacaatggctgcaggcggtggcgcaccaatggcagacaataacgaaggtgccgacggagtgggtagttcctcgggaaattggcattgcgattccacatggctgggcgacagagtcatcaccaccagcacccgaacctgggccctgcccacctacaacaaccacctctacaagcaaatctccaacgggacctcgggaggcagcaccaacgacaacacctactttggctacagcaccccctgggggtattttgactttaacagattccactgccacttctcaccacgtgactggcagcgactcatcaacaacaactggggattccggcccaagagactcaacttcaagctcttcaacatccaggtcaaagaggtcacgcagaatgaaggcaccaagaccatcgccaataacctcaccagcaccatccaggtgtttacggactcggaataccagctgccgtacgtcctcggctctgcccaccagggctgcctgcctccgttcccggcggacgtcttcatgattcctcagtacggctacctgactctcaacaacggtagtcaggccgtgggacgttcctccttctactgcctggagtacttcccctctcagatgctgagaacgggcaacaactttgagttcagctacactttcgaggacgtgcctttccacagcagctacgcgcacagccagagtttggacaggctgatgaatcctctcatcgaccagtacctgtactacctgtcaagaacccagtctacgggaggcacagcgggaacccagcagttgctgttttctcaggccgggcctagcaacatgtcggctcaggccaaaaactggctgcctggaccctgctacagacagcagcgcgtctccacgacactgtcgcaaaacaacaacagcaactttgcctggactggtgccaccaagtatcatctgaacggcagagactctctggtgaatccgggcgtcgccatggcaacccacaaggacgacgaggaccgcttcttcccatccagcggcatcctcatgtttggcaagcagggagctggaaaagacaacgtggactatagcaacgtgatgctaaccagcgaggaagaaatcaagaccaccaaccccgtggccacagaacagtatggcgtggtggctgataacctacagcagcaaaacaccgctcctattgtgggggccgtcaacagccagggagccttacctggcatggtctggcagaaccgggacgtgtacctgcagggtcctatttgggccaagattcctcacacagatggcaactttcacccgtctcctttaatgggcggctttggacttaaacatccgcctcctcagatcctcatcaaaaacactcctgttcctgcggatcctccaacaacgttcaaccaggccaagctgaattctttcatcacgcagtacagcaccggacaagtcagcgtggagatcgagtgggagctgcagaaggagaacagcaagcgctggaacccagagattcagtatacttccaactactacaaatctacaaatgtggactttgctgttaatactgagggtgtttactctgagcctcgccccattggcactcgttacctcacccgtaatctg

SEQ ID NO: 922 - protein, 738 aa, synthetic construct
  VARIANT 471: note = /replace="Asn
  REGION 1..738: note = SITE - /note="Variant residues given in the sequence have no preference with respect to those in the annotations for variant positions"
  REGION 1..738: note = source = /note="Description of Artificial Sequence: Synthetic polypeptide"
MAADGYLPDWLEDNLSEGIREWWDLKPGAPKPKANQQKQDDGRGLVLPGYKYLGPFNGLDKGEPVNAADAAALEHDKAYDQQLKAGDNPYLRYNHADAEFQERLQEDTSFGGNLGRAVFQAKKRVLEPLGLVEEGAKTAPGKKRPVEPSPQRSPDSSTGIGKKGQQPAKKRLNFGQTGDSESVPDPQPIGEPPAGPSGLGSGTMAAGGGAPMADNNEGADGVGSSSGNWHCDSTWLGDRVITTSTRTWALPTYNNHLYKQISNGTSGGSTNDNTYFGYSTPWGYFDFNRFHCHFSPRDWQRLINNNWGFRPKRLNFKLFNIQVKEVTQNEGTKTIANNLTSTIQVFTDSEYQLPYVLGSAHQGCLPPFPADVFMIPQYGYLTLNNGSQAVGRSSFYCLEYFPSQMLRTGNNFEFSYTFEDVPFHSSYAHSQSLDRLMNPLIDQYLYYLSRTQSTGGTAGTQQLLFSQAGPSNMSAQAKNWLPGPCYRQQRVSTTLSQNNNSNFAWTGATKYHLNGRDSLVNPGVAMATHKDDEERFFPSSGVLMFGKQGAGKDNVDYSSVMLTSEEEIKTTNPVATEQYGVVADNLQQQNTAPIVGAVNSQGALPGMVWQNRDVYLQGPIWAKIPHTDGNFHPSPLMGGFGLKHPPPQILIKNTPVPADPPTTFSQAKLASFITQYSTGQVSVEIEWELQKENSKRWNPEIQYTSNYYKSTNVDFAVNTEGTYSEPRPIGTRYLTRNL

SEQ ID NO: 923 - DNA, 2214 bp, synthetic construct
  misc_difference 1411..1413: note = variation - /replace="aat" - can be aat
  misc_feature 1..2214: note = /note="Variant residues given in the sequence have no preference with respect to those in the annotations for variant positions"
  misc_feature 1..2214: note = source = /note="Description of Artificial Sequence: Synthetic polynucleotide"
  source 1..2214: mol_type = other DNA
atggctgccgatggttatcttccagattggctcgaggacaacctctctgagggcattcgcgagtggtgggacttgaaacctggagccccgaaacccaaagccaaccagcaaaagcaggacgacggccggggtctggtgcttcctggctacaagtacctcggacccttcaacggactcgacaagggggagcccgtcaacgcggcggacgcagcggccctcgagcacgacaaggcctacgaccagcagctcaaagcgggtgacaatccgtacctgcggtataaccacgccgacgccgagtttcaggagcgtctgcaagaagatacgtcttttgggggcaacctcgggcgagcagtcttccaggccaagaagcgggttctcgaacctctcggtctggttgaggaaggcgctaagacggctcctggaaagaagagaccggtagagccatcaccccagcgttctccagactcctctacgggcatcggcaagaaaggccagcagcccgcgaaaaagagactcaactttgggcagactggcgactcagagtcagtgcccgaccctcaaccaatcggagaaccccccgcaggcccctctggtctgggatctggtacaatggctgcaggcggtggcgctccaatggcagacaataacgaaggcgccgacggagtgggtagttcctcaggaaattggcattgcgattccacatggctgggcgacagagtcatcaccaccagcacccgaacctgggccctccccacctacaacaaccacctctacaagcaaatctccaacgggacttcgggaggaagcaccaacgacaacacctacttcggctacagcaccccctgggggtattttgactttaacagattccactgccacttctcaccacgtgactggcagcgactcatcaacaacaactggggattccggcccaagagactcaacttcaagctcttcaacatccaggtcaaggaggtcacgcagaatgaaggcaccaagaccatcgccaataaccttaccagcacgattcaggtctttacggactcggaataccagctcccgtacgtcctcggctctgcgcaccagggctgcctgcctccgttcccggcggacgtcttcatgattcctcagtacgggtacctgactctgaacaatggcagtcaggccgtgggccgttcctccttctactgcctggagtactttccttctcaaatgctgagaacgggcaacaactttgagttcagctacacgtttgaggacgtgccttttcacagcagctacgcgcacagccaaagcctggaccggctgatgaaccccctcatcgaccagtacctgtactacctgtctcggactcagtccacgggaggtaccgcaggaactcagcagttgctattttctcaggccgggcctagtaacatgtcggctcaggccaaaaactggctacccgggccctgctaccggcagcaacgcgtctccacgacactgtcgcaaaataacaacagcaactttgcctggaccggtgccaccaagtatcatctgaatggcagagactctctggtaaatcccggtgtcgctatggcaacccacaaggacgacgaagagcgattttttccgtccagcggagtcttaatgtttgggaaacagggagctggaaaagacaacgtggactatagcagcgttatgctaaccagtgaggaagaaattaaaaccaccaacccagtggccacagaacagtacggcgtggtggccgataacctgcaacagcaaaacaccgctcctattgtaggggccgtcaacagtcaaggagccttacctggcatggtctggcagaaccgggacgtgtacctgcagggtcctatctgggccaagattcctcacacggacggaaactttcatccctcgccgctgatgggaggctttggactgaaacacccgcctcctcagatcctgattaagaatacacctgttcccgcggatcctccaactaccttcagtcaagctaagctggcgtcgttcatcacgcagtacagcaccggacaggtcagcgtggaaattgaatgggagctgcagaaagaaaacagcaaacgctggaacccagagattcaatacacttccaactactacaaatctacaaatgtggactttgctgttaacacagaaggcacttattctgagcctcgccccatcggcacccgttacctcacccgtaatctg

SEQ ID NO: 924 - protein, 737 aa, synthetic construct
  VARIANT 148: note = /replace="Gln" - can be Gln
  VARIANT 169: note = /replace="Arg" - can be Arg
  VARIANT 314: note = /replace="Asn" - can be Asn
  VARIANT 466: note = /replace="His" - can be His
  VARIANT 563: note = /replace="Ser" - can be Ser
  VARIANT 580: note = /replace="Ile" - can be Ile
  VARIANT 588: note = /replace="Ser
  REGION 1..737: note = SITE - /note="Variant residues given in the sequence have no preference with respect to those in the annotations for variant positions"
  REGION 1..737: note = source = /note="Description of Artificial Sequence: Synthetic polypeptide"
MAADGYLPDWLEDNLSEGIREWWDLKPGAPKPKANQQKQDDGRGLVLPGYKYLGPFNGLDKGEPVNAADAAALEHDKAYDQQLKAGDNPYLRYNHADAEFQERLQEDTSFGGNLGRAVFQAKKRVLEPLGLVEEGAKTAPGKKRPVEPSPQRSPDSSTGIGKKGQQPAKKRLNFGQTGDSESVPDPQPLGEPPAAPSGVGSGTMAAGGGAPMADNNEGADGVGNASGNWHCDSTWLGDRVITTSTRTWALPTYNNHLYKQISSQSAGSTNDNTYFGYSTPWGYFDFNRFHCHFSPRDWQRLINNNWGFRPKKLRFKLFNIQVKEVTTNDGVTTIANNLTSTVQVFSDSEYQLPYVLGSAHQGCLPPFPADVFMIPQYGYLTLNNGSQSVGRSSFYCLEYFPSQMLRTGNNFEFSYTFEDVPFHSSYAHSQSLDRLMNPLIDQYLYYLARTQSTTGGTAGNRELQFYQAGPSTMAEQAKNWLPGPCYRQQRVSKTLDQNNNSNFAWTGATKYHLNGRNSLVNPGVAMATHKDDEDRFFPSSGVLIFGKTGAANKTTLENVLMTNEEEIKTTNPVATEEYGVVSSNLQSANTAPQTQTVNSQGALPGMVWQNRDVYLQGPIWAKIPHTDGNFHPSPLMGGFGLKHPPPQILIKNTPVPANPPEVFTPAKFASFITQYSTGQVSVEIEWELQKENSKRWNPEIQYTSNYDKSTNVDFAVDSEGVYSEPRPIGTRYLTRNL

SEQ ID NO: 925 - DNA, 2211 bp, synthetic construct
  misc_difference 442..444: note = variation - /replace="cag" - can be cag
  misc_difference 505..507: note = variation - /replace="aga" - can be aga
  misc_difference 940..942: note = variation - /replace="aac" - can be aac
  misc_difference 1396..1398: note = variation - /replace="cac" - can be cac
  misc_difference 1687..1689: note = variation - /replace="agt" - can be agt
  misc_difference 1738..1740: note = variation - /replace="ata" - can be ata
  misc_difference 1762..1764: note = variation - /replace="tct" - can be tct
  misc_feature 1..2211: note = /note="Variant residues given in the sequence have no preference with respect to those in the annotations for variant positions"
  misc_feature 1..2211: note = source = /note="Description of Artificial Sequence: Synthetic polynucleotide"
  source 1..2211: mol_type = other DNA
atggctgccgatggttatcttccagattggctcgaggacaacctctctgagggcattcgcgagtggtgggacctgaaacctggagccccgaaacccaaagccaaccagcaaaagcaggacgacggccggggtctggtgcttcctggctacaagtacctcggacccttcaacggactcgacaagggggagcccgtcaacgcggcggacgcagcggccctcgagcacgacaaggcctacgaccagcagctcaaagcgggtgacaatccgtacctgcggtataaccacgccgacgccgagtttcaggagcgtctgcaagaagatacgtcatttgggggcaacctcgggcgagcagtcttccaggccaagaagcgggttctcgaacctctcggtctggttgaggaaggcgctaagacggctcctggaaagaagagaccggtagagccgtcacctcagcgttcccccgactcctccacgggcatcggcaagaaaggccagcagcccgccaaaaagagactcaatttcggtcagactggcgactcagagtcagtccccgaccctcaacctctcggagaacctccagcagcgccctctggtgtgggatctggtacaatggctgcaggcggtggcgcaccaatggcagacaataacgaaggtgccgacggagtgggtaatgcctcaggaaattggcattgcgattccacatggctgggcgacagagtcattaccaccagcacccgaacctgggccctgcccacctacaacaaccacctctacaagcaaatctccagtcaaagtgcaggtagtaccaacgacaacacctacttcggctacagcaccccctgggggtattttgactttaacagattccactgccacttctcaccacgtgactggcagcgactcatcaacaacaactggggattccggcccaagaagctgcggttcaagctcttcaacatccaggtcaaggaggtcacgacgaatgacggcgttacgaccatcgctaataaccttaccagcacggttcaggtattctcggactcggaataccagctgccgtacgtcctcggctctgcgcaccagggctgcctgcctccgttcccggcggacgtcttcatgattcctcagtacggctacctgactctcaacaatggcagtcagtctgtgggacgttcctccttctactgcctggagtacttcccctctcagatgctgagaacgggcaacaactttgagttcagctacaccttcgaggacgtgcctttccacagcagctacgcacacagccagagcctggaccggctgatgaatcccctcatcgaccagtacttgtactacctggccagaacacagagtaccacaggaggcacagctggcaatcgggaactgcagttttaccaggccgggccttcaactatggccgaacaagccaagaattggttacctggaccttgctaccggcaacaaagagtctccaaaacgctggatcaaaacaacaacagcaactttgcttggactggtgccaccaaatatcacctgaacggcagaaactcgttggttaatcccggcgtcgccatggcaactcacaaggacgacgaggaccgctttttcccatccagcggagtcctgatttttggaaaaactggagcagctaacaaaactacattggaaaatgtgttaatgacaaatgaagaagaaattaaaactactaatcctgtagccacggaagaatacggggtagtcagcagcaacttacaatcggctaatactgcaccccagacacaaactgtcaacagccagggagccttacctggcatggtctggcagaaccgggacgtgtacctgcagggtcccatctgggccaagattcctcacacggatggcaactttcacccgtctcctttgatgggcggctttggacttaaacatccgcctcctcagatcctgatcaagaacactcccgttcccgctaatcctccggaggtgtttactcctgccaagtttgcttcgttcatcacacagtacagcaccggacaagtcagcgtggaaatcgagtgggagctgcagaaggaaaacagcaagcgctggaacccggagattcagtacacctccaactatgataagtcgactaatgtggactttgccgttgacagcgagggtgtttactctgagcctcgccctattggcactcgttacctcacccgtaatctg

SEQ ID NO: 926 - protein, 735 aa, synthetic construct
  VARIANT 162: note = /replace="Thr" - can be Thr
  VARIANT 168: note = /replace="Arg" - can be Arg
  VARIANT 224: note = /replace="Ser" - can be Ser
  VARIANT 310: note = /replace="Lys" - can be Lys
  VARIANT 410: note = /replace="Gln" - can be Gln
  VARIANT 446: note = /replace="Asn" - can be Asn
  VARIANT 461: note = /replace="Leu" - can be Leu
  VARIANT 471: note = /replace="Ser" - can be Ser
  VARIANT 708: note = /replace="Thr
  REGION 1..735: note = SITE - /note="Variant residues given in the sequence have no preference with respect to those in the annotations for variant positions"
  REGION 1..735: note = source = /note="Description of Artificial Sequence: Synthetic polypeptide"
MAADGYLPDWLEDNLSEGIREWWDLKPGAPKPKANQQKQDDGRGLVLPGYKYLGPFNGLDKGEPVNAADAAALEHDKAYDQQLKAGDNPYLRYNHADAEFQERLQEDTSFGGNLGRAVFQAKKRVLEPLGLVEEGAKTAPGKKRPVEQSPQEPDSSSGIGKSGQQPAKKRLNFGQTGDSESVPDPQPLGEPPAAPSGVGSNTMASGGGAPMADNNEGADGVGNASGNWHCDSTWLGDRVITTSTRTWALPTYNNHLYKQISSQSGASNDNHYFGYSTPWGYFDFNRFHCHFSPRDWQRLINNNWGFRPKRLNFKLFNIQVKEVTTNDGTTTIANNLTSTVQVFTDSEYQLPYVLGSAHQGCLPPFPADVFMIPQYGYLTLNNGSQAVGRSSFYCLEYFPSQMLRTGNNFTFSYTFEDVPFHSSYAHSQSLDRLMNPLIDQYLYYLSRTQTTSGTAQNRELQFSQAGPSSMANQAKNWLPGPCYRQQRVSKTANDNNNSNFAWTGATKYHLNGRDSLVNPGPAMASHKDDEDKFFPMSGVLIFGKQGAGASNVDLDNVMITDEEEIKTTNPVATEQYGTVATNLQSSNTAPATGTVNSQGALPGMVWQDRDVYLQGPIWAKIPHTDGHFHPSPLMGGFGLKHPPPQILIKNTPVPANPPTTFSPAKFASFITQYSTGQVSVEIEWELQKENSKRWNPEIQYTSNYNKSANVDFTVDTNGVYSEPRPIGTRYLTRNL

SEQ ID NO: 927 - DNA, 2205 bp, synthetic construct
  misc_difference 484..486: note = variation - /replace="aca" - can be aca
  misc_difference 502..504: note = variation - /replace="aga" - can be aga
  misc_difference 670..672: note = variation - /replace="tcc" - can be tcc
  misc_difference 928..930: note = variation - /replace="aaa" - can be aaa
  misc_difference 1228..1230: note = variation - /replace="cag" - can be cag
  misc_difference 1336..1338: note = variation - /replace="aac" - can be aac
  misc_difference 1381..1383: note = variation - /replace="ctg" - can be ctg
  misc_difference 1411..1413: note = variation - /replace="tct" - can be tct
  misc_difference 2122..2124: note = variation - /replace="acc" - can be acc
  misc_feature 1..2205: note = /note="Variant residues given in the sequence have no preference with respect to those in the annotations for variant positions"
  misc_feature 1..2205: note = source = /note="Description of Artificial Sequence: Synthetic polynucleotide"
  source 1..2205: mol_type = other DNA
atggctgccgatggttatcttccagattggctcgaggacaacctctctgagggcattcgcgagtggtgggacttgaaacctggagccccgaaacccaaagccaaccagcaaaagcaggacgacggccggggtctggtgcttcctggctacaagtacctcggacccttcaacggactcgacaagggggagcccgtcaacgcggcggatgcagcggccctcgagcacgacaaggcctacgaccagcagctcaaagcgggtgacaatccgtacctgcggtataaccacgccgacgccgagtttcaggagcgtctgcaagaagatacgtcttttgggggcaacctcgggcgagcagtcttccaggccaagaagagggttctcgaacctcttggtctggttgaggaaggtgctaagacggctcctggaaagaaacgtccggtagagcagtcgccacaagagccagactcctcctcgggcattggcaagtcaggccagcagcccgctaaaaagagactcaattttggtcagactggcgactcagagtcagtccccgacccacaacctctcggagaacctccagcagccccctctggtgtgggatctaatacaatggcttcaggcggtggcgcaccaatggcagacaataacgaaggcgccgacggagtgggtaatgcctcaggaaattggcattgcgattccacatggctgggcgacagagtcatcaccaccagcacccgaacatgggccttgcccacctataacaaccacctctacaagcaaatctccagtcaatcaggggccagcaacgacaaccactacttcggctacagcaccccctgggggtattttgatttcaacagattccactgccatttctcaccacgtgactggcagcgactcatcaacaacaattggggattccggcccaagagactcaacttcaagctcttcaacatccaagtcaaggaggtcacgacgaatgatggcaccacgaccatcgctaataaccttaccagcacggttcaagtcttcacggactcggagtaccagttgccgtacgtcctcggctctgcgcaccagggctgcctccctccgttcccggcggacgtgttcatgattccgcagtacggctacctaacgctcaacaatggcagccaggcagtgggacggtcatccttttactgcctggaatatttcccatcgcagatgctgagaacgggcaataactttaccttcagctacaccttcgaggacgtgcctttccacagcagctacgcgcacagccagagcctggaccggctgatgaatcctctcatcgaccagtacctgtattacctgagcagaactcagactacgtccggaactgcccaaaacagggagttgcagtttagccaggcgggtccatctagcatggctaatcaggccaaaaactggctacctggaccctgttaccggcagcagcgcgtttctaaaacagcaaatgacaacaacaacagcaactttgcctggactggtgctacaaaatatcaccttaatgggcgtgattctttagtcaaccctggccctgctatggcctcacacaaagacgacgaagacaagttctttcccatgagcggtgtcttgatttttggaaagcagggcgccggagcttcaaacgttgatttggacaatgtcatgatcacagacgaagaggaaatcaaaaccactaaccccgtggccaccgaacaatatgggactgtggcaaccaatctccagagcagcaacacagcccctgcgaccggaactgtgaattctcagggagccttacctggaatggtgtggcaagacagagacgtatacctgcagggtcctatttgggccaaaattcctcacacggatggacactttcacccgtctcctctcatgggcggctttggacttaagcacccgcctcctcagatcctcatcaaaaacacgcctgttcctgcgaatcctccgacaacgttttcgcctgcaaagtttgcttcattcatcacccagtattccacaggacaagtgagcgtggagattgaatgggagctgcagaaagaaaacagcaaacgctggaatcccgaaatacagtatacatctaactataataaatctgccaacgttgatttcactgtggacaccaatggagtttatagtgagcctcgccccattggcacccgttacctcacccgtaacctg

SEQ ID NO: 928 - protein, 735 aa, synthetic construct
  VARIANT 42: note = /replace="Ser" - can be Ser
  VARIANT 168: note = /replace="Lys" - can be Lys
  VARIANT 310: note = /replace="Arg" - can be Arg
  VARIANT 410: note = /replace="Gln" - can be Gln
  VARIANT 446: note = /replace="Arg" - can be Arg
  VARIANT 461: note = /replace="Leu" - can be Leu
  VARIANT 471: note = /replace="Ser" - can be Ser
  VARIANT 475: note = /replace="Arg" - can be Arg
  VARIANT 504: note = /replace="Ala" - can be Ala
  VARIANT 539: note = /replace="Asn
  REGION 1..735: note = SITE - /note="Variant residues given in the sequence have no preference with respect to those in the annotations for variant positions"
  REGION 1..735: note = source = /note="Description of Artificial Sequence: Synthetic polypeptide"
MAADGYLPDWLEDNLSEGIREWWDLKPGAPQPKANQQHQDDGRGLVLPGYKYLGPFNGLDKGEPVNEADAAALEHDKAYDQQLKAGDNPYLKYNHADAEFQERLQEDTSFGGNLGRAVFQAKKRVLEPLGLVEEAAKTAPGKKRPVEQSPQEPDSSSGIGKSGQQPARKRLNFGQTGDSESVPDPQPLGEPPAAPSGVGSNTMASGGGAPMADNNEGADGVGNSSGNWHCDSTWLGDRVITTSTRTWALPTYNNHLYKQISSQSGASNDNHYFGYSTPWGYFDFNRFHCHFSPRDWQRLINNNWGFRPKKLNFKLFNIQVKEVTQNDGTTTIANNLTSTVQVFTDSEYQLPYVLGSAHQGCLPPFPADVFMIPQYGYLTLNNGSQAVGRSSFYCLEYFPSQMLRTGNNFTFSYTFEDVPFHSSYAHSQSLDRLMNPLIDQYLYYLSRTQTTSGTTQQSRLQFSQAGPSSMAQQAKNWLPGPCYRQQRVSKTANDNNNSNFAWTGATKYHLNGRDSLVNPGPAMASHKDDEEKFFPMHGVLIFGKQGTGASNVDLDNVMITDEEEIRTTNPVATEQYGTVATNLQSSNTAPATGTVNSQGALPGMVWQDRDVYLQGPIWAKIPHTDGHFHPSPLMGGFGLKHPPPQILIKNTPVPANPPTTFSPAKFASFITQYSTGQVSVEIEWELQKENSKRWNPEIQYTSNYNKSVNVDFTVDTNGVYSEPRPIGTRYLTRNL

SEQ ID NO: 929 - DNA, 2205 bp, synthetic construct
  misc_difference 124..126: note = variation - /replace="agt" - can be agt
  misc_difference 502..504: note = variation - /replace="aaa" - can be aaa
  misc_difference 928..930: note = variation - /replace="aga" - can be aga
  misc_difference 1228..1230: note = variation - /replace="cag" - can be cag
  misc_difference 1336..1338: note = variation - /replace="aga" - can be aga
  misc_difference 1381..1383: note = variation - /replace="ctc" - can be ctc
  misc_difference 1411..1413: note = variation - /replace="tct" - can be tct
  misc_difference 1423..1425: note = variation - /replace="aga" - can be aga
  misc_difference 1510..1512: note = variation - /replace="gcg" - can be gcg
  misc_difference 1615..1617: note = variation - /replace="aac" - can be aac
  misc_feature 1..2205: note = /note="Variant residues given in the sequence have no preference with respect to those in the annotations for variant positions"
  misc_feature 1..2205: note = source = /note="Description of Artificial Sequence: Synthetic polynucleotide"
  source 1..2205: mol_type = other DNA
atggctgctgacggttatcttccagattggctcgaggacaacctttctgaaggcattcgtgagtggtgggatctgaaacctggagcccctcaacccaaagcgaaccaacaacaccaggacgacggtcggggtcttgtgcttccgggttacaaatacctcggaccctttaacggactcgacaaaggagagccggtcaacgaggcggacgcggcagccctcgaacacgacaaagcttacgaccagcagctcaaggccggtgacaacccgtacctcaagtacaaccacgccgacgccgagtttcaggagcgtcttcaagaagatacgtcttttgggggcaaccttggcagagcagtcttccaggccaaaaagagggtccttgagcctcttggtctggttgaggaagcagctaaaacggctcctggaaagaagaggcctgtagaacagtctcctcaggaaccggactcatcatctggtattggcaaatcgggccaacagcctgccagaaaaagactaaatttcggtcagactggagactcagagtcagtcccagaccctcaacctctcggagaaccaccagcagccccctcaggtgtgggatctaatacaatggcttcaggcggtggcgcaccaatggcagacaataacgagggtgccgatggagtgggtaattcctcaggaaattggcattgcgattccacatggctgggcgacagagtcatcaccaccagcaccagaacctgggccctgcccacttacaacaaccatctctacaagcaaatctccagccaatcaggagcttcaaacgacaaccactactttggctacagcaccccttgggggtattttgactttaacagattccactgccacttctcaccacgtgactggcagcgactcattaacaacaactggggattccggcccaagaaactcaacttcaagctcttcaacatccaagttaaagaggtcacgcagaacgatggcacgacgactattgccaataaccttaccagcacggttcaagtgtttacggactcggagtatcagctcccgtacgtgctcgggtcggcgcaccaaggctgtctcccgccgtttccagcggacgtcttcatgatccctcagtatggatacctcaccctgaacaacggaagtcaagcggtgggacgctcatccttttactgcctggagtacttcccttcgcagatgctaaggactggaaataacttcacattcagctataccttcgaggatgtaccttttcacagcagctacgctcacagccagagtttggatcgcttgatgaatcctcttattgatcagtatctgtactacctgagcagaacgcaaacaacctctggaacaacccaacaatcacggctgcaatttagccaggctgggccttcgtctatggctcagcaggccaaaaattggctacctgggccctgctaccggcaacagagagtttcaaagactgctaacgacaacaacaacagtaactttgcttggacaggggccaccaaatatcatctcaatggccgcgactcgctggtgaatccaggaccagctatggccagtcacaaggacgatgaagaaaaatttttccctatgcacggcgttctaatatttggcaaacaagggacaggggcaagtaacgtagatttagataatgtaatgattacggatgaagaagagattcgtaccaccaatcctgtggcaacagagcagtatggaactgtggcaactaacttgcagagctcaaatacagctcccgcgactggaactgtcaatagtcagggggccttacctggcatggtgtggcaagatcgtgacgtgtaccttcaaggacctatctgggcaaagattcctcacacggatggacactttcatccttctcctctgatgggaggctttggactgaaacatccgcctcctcaaatcttgatcaaaaatactccggtaccggcaaatcctccgacgactttcagcccggccaagtttgcttcatttatcactcagtactccactggacaggtcagcgtggaaattgagtgggagctacagaaagaaaacagcaaacgttggaatccagagattcagtacacttccaactacaacaagtctgttaatgtggactttactgtagacactaatggtgtttatagtgaacctcgccctattggaacccggtatctcacacgaaacttg

SEQ ID NO: 930 - protein, 736 aa, synthetic construct
  REGION 1..736: note = source = /note="Description of Artificial Sequence: Synthetic polypeptide"
MAADGYLPDWLEDNLSEGIREWWDLKPGAPKPKANQQKQDDGRGLVLPGYKYLGPFNGLDKGEPVNAADAAALEHDKAYDQQLKAGDNPYLRYNHADAEFQERLQEDTSFGGNLGRAVFQAKKRVLEPLGLVEEGAKTAPGKKRPVEQSPQEPDSSSGIGKKGQQPARKRLNFGQTGDSESVPDPQPLGEPPAAPSGVGSNTMAAGGGAPMADNNEGADGVGNASGNWHCDSTWLGDRVITTSTRTWALPTYNNHLYKQISSQSGGSTNDNTYFGYSTPWGYFDFNRFHCHFSPRDWQRLINNNWGFRPKRLNFKLFNIQVKEVTTNDGTTTIANNLTSTVQVFTDSEYQLPYVLGSAHQGCLPPFPADVFMIPQYGYLTLNNGSQAVGRSSFYCLEYFPSQMLRTGNNFEFSYTFEDVPFHSSYAHSQSLDRLMNPLIDQYLYYLSRTQTTSGTAGNRTLQFSQAGPSSMANQAKNWLPGPCYRQQRVSKTANQNNNSNFAWTGATKYHLNGRDSLVNPGPAMATHKDDEDKFFPMSGVLIFGKQGAGNSNVDLDNVMITNEEEIKTTNPVATEQYGTVATNLQSANTAPATGTVNSQGALPGMVWQDRDVYLQGPIWAKIPHTDGHFHPSPLMGGFGLKHPPPQILIKNTPVPANPPTTFSPAKFASFITQYSTGQVSVEIEWELQKENSKRWNPEIQYTSNYNKSTNVDFAVDTNGVYSEPRPIGTRYLTRNL

SEQ ID NO: 931 - protein, 736 aa, synthetic construct
  REGION 1..736: note = source = /note="Description of Artificial Sequence: Synthetic polypeptide"
MAADGYLPDWLEDNLSEGIREWWDLKPGAPKPKANQQKQDDGRGLVLPGYKYLGPFNGLDKGEPVNAADAAALEHDKAYDQQLKAGDNPYLRYNHADAEFQERLQEDTSFGGNLGRAVFQAKKRVLEPLGLVEEGAKTAPGKKRPVEQSPQEPDSSSGIGKKGQQPAKKRLNFGQTGDSESVPDPQPLGEPPAAPSGVGSNTMASGGGAPMADNNEGADGVGNASGNWHCDSTWLGDRVITTSTRTWALPTYNNHLYKQISSQSGASTNDNTYFGYSTPWGYFDFNRFHCHFSPRDWQRLINNNWGFRPKRLNFKLFNIQVKEVTTNDGTTTIANNLTSTVQVFTDSEYQLPYVLGSAHQGCLPPFPADVFMIPQYGYLTLNNGSQAVGRSSFYCLEYFPSQMLRTGNNFQFSYTFEDVPFHSSYAHSQSLDRLMNPLIDQYLYYLSRTQTTSGTAGNRELQFSQAGPSSMANQAKNWLPGPCYRQQRVSKTTNQNNNSNFAWTGATKYHLNGRDSLVNPGPAMATHKDDEDKFFPMSGVLIFGKQGAGNSNVDLDNVMITNEEEIKTTNPVATEEYGTVATNLQSANTAPATGTVNSQGALPGMVWQNRDVYLQGPIWAKIPHTDGHFHPSPLMGGFGLKHPPPQILIKNTPVPANPPTTFSPAKFASFITQYSTGQVSVEIEWELQKENSKRWNPEIQYTSNYNKSTNVDFAVDTNGVYSEPRPIGTRYLTRNL

SEQ ID NO: 932 - protein, 736 aa, synthetic construct
  REGION 1..736: note = source = /note="Description of Artificial Sequence: Synthetic polypeptide"
MAADGYLPDWLEDNLSEGIREWWDLKPGAPKPKANQQKQDDGRGLVLPGYKYLGPFNGLDKGEPVNAADAAALEHDKAYDQQLKAGDNPYLRYNHADAEFQERLQEDTSFGGNLGRAVFQAKKRVLEPLGLVEEGAKTAPGKKRPVEQSPQEPDSSSGIGKKGQQPARKRLNFGQTGDSESVPDPQPLGEPPAAPSGVGSNTMAAGGGAPMADNNEGADGVGNASGNWHCDSTWLGDRVITTSTRTWALPTYNNHLYKQISSQSGGSTNDNTYFGYSTPWGYFDFNRFHCHFSPRDWQRLINNNWGFRPKRLNFKLFNIQVKEVTTNDGTTTIANNLTSTVQVFTDSEYQLPYVLGSAHQGCLPPFPADVFMIPQYGYLTLNNGSQAVGRSSFYCLEYFPSQMLRTGNNFEFSYTFEDVPFHSSYAHSQSLDRLMNPLIDQYLYYLSRTQTTSGTAGNRELQFSQAGPSSMANQAKNWLPGPCYRQQRVSKTTNQNNNSNFAWTGATKYHLNGRDSLVNPGPAMATHKDDEDKFFPMSGVLIFGKQGAGNSNVDLDNVMITSEEEIKTTNPVATEEYGTVATNLQSSNTAPATGTVNSQGALPGMVWQERDVYLQGPIWAKIPHTDGHFHPSPLMGGFGLKHPPPQILIKNTPVPANPPTTFSPAKFASFITQYSTGQVSVEIEWELQKENSKRWNPEIQYTSNYNKSTNVDFAVDTNGVYSEPRPIGTRYLTRNL

SEQ ID NO: 933 - protein, 736 aa, synthetic construct
  REGION 1..736: note = source = /note="Description of Artificial Sequence: Synthetic polypeptide"
MAADGYLPDWLEDNLSEGIREWWDLKPGAPKPKANQQKQDDGRGLVLPGYKYLGPFNGLDKGEPVNAADAAALEHDKAYDQQLKAGDNPYLRYNHADAEFQERLQEDTSFGGNLGRAVFQAKKRVLEPLGLVEEGAKTAPGKKRPVEQSPQEPDSSSGIGKKGQQPARKRLNFGQTGDSESVPDPQPLGEPPAAPSGVGSNTMASGGGAPMADNNEGADGVGNASGNWHCDSTWLGDRVITTSTRTWALPTYNNHLYKQISSQSGGSTNDNTYFGYSTPWGYFDFNRFHCHFSPRDWQRLINNNWGFRPKKLNFKLFNIQVKEVTTNDGTTTIANNLTSTVQVFTDSEYQLPYVLGSAHQGCLPPFPADVFMIPQYGYLTLNNGSQAVGRSSFYCLEYFPSQMLRTGNNFEFSYTFEDVPFHSSYAHSQSLDRLMNPLIDQYLYYLSRTQTTSGTAGNRELQFSQAGPSSMANQAKNWLPGPCYRQQRVSKTTNQNNNSNFAWTGATKYHLNGRDSLVNPGPAMATHKDDEDKFFPMSGVLIFGKQGAGNSNVDLDNVMITSEEEIKTTNPVATEEYGTVATNLQSANTAPATGTVNSQGALPGMVWQDRDVYLQGPIWAKIPHTDGHFHPSPLMGGFGLKHPPPQILIKNTPVPANPPTTFSPAKFASFITQYSTGQVSVEIEWELQKENSKRWNPEIQYTSNYNKSTNVDFAVDTNGVYSEPRPIGTRYLTRNL

SEQ ID NO: 934 - protein, 736 aa, synthetic construct
  REGION 1..736: note = source = /note="Description of Artificial Sequence: Synthetic polypeptide"
MAADGYLPDWLEDNLSEGIREWWDLKPGAPKPKANQQKQDDGRGLVLPGYKYLGPFNGLDKGEPVNAADAAALEHDKAYDQQLKAGDNPYLRYNHADAEFQERLQEDTSFGGNLGRAVFQAKKRVLEPLGLVEEGAKTAPGKKRPVEQSPQEPDSSSGIGKKGQQPARKRLNFGQTGDSESVPDPQPLGEPPAAPSGVGSNTMAAGGGAPMADNNEGADGVGNASGNWHCDSTWLGDRVITTSTRTWALPTYNNHLYKQISSQSGGSTNDNTYFGYSTPWGYFDFNRFHCHFSPRDWQRLINNNWGFRPKKLNFKLFNIQVKEVTTNDGTTTIANNLTSTVQVFTDSEYQLPYVLGSAHQGCLPPFPADVFMIPQYGYLTLNNGSQAVGRSSFYCLEYFPSQMLRTGNNFQFSYTFEDVPFHSSYAHSQSLDRLMNPLIDQYLYYLSRTQTTSGTAGNRTLQFSQAGPSSMANQAKNWLPGPCYRQQRVSKTTNQNNNSNFAWTGATKYHLNGRDSLVNPGPAMATHKDDEDKFFPMSGVLIFGKQGAGNSNVDLDNVMITNEEEIKTTNPVATEEYGTVATNLQSANTAPATGTVNSQGALPGMVWQDRDVYLQGPIWAKIPHTDGHFHPSPLMGGFGLKHPPPQILIKNTPVPANPPTTFSPAKFASFITQYSTGQVSVEIEWELQKENSKRWNPEIQYTSNYNKSTNVDFAVDTNGVYSEPRPIGTRYLTRNL

SEQ ID NO: 935 - protein, 736 aa, synthetic construct
  REGION 1..736: note = source = /note="Description of Artificial Sequence: Synthetic polypeptide"
MAADGYLPDWLEDNLSEGIREWWDLKPGAPKPKANQQKQDDGRGLVLPGYKYLGPFNGLDKGEPVNAADAAALEHDKAYDQQLKAGDNPYLRYNHADAEFQERLQEDTSFGGNLGRAVFQAKKRVLEPLGLVEEGAKTAPGKKRPVEQSPQEPDSSSGIGKKGQQPAKKRLNFGQTGDSESVPDPQPLGEPPAAPSGVGSNTMAAGGGAPMADNNEGADGVGNASGNWHCDSTWLGDRVITTSTRTWALPTYNNHLYKQISSQSGGSTNDNTYFGYSTPWGYFDFNRFHCHFSPRDWQRLINNNWGFRPKKLNFKLFNIQVKEVTTNDGTTTIANNLTSTVQVFTDSEYQLPYVLGSAHQGCLPPFPADVFMIPQYGYLTLNNGSQAVGRSSFYCLEYFPSQMLRTGNNFEFSYTFEDVPFHSSYAHSQSLDRLMNPLIDQYLYYLSRTQTTSGTAGNRTLQFSQAGPSSMANQAKNWLPGPCYRQQRVSKTANQNNNSNFAWTGATKYHLNGRDSLVNPGPAMATHKDDEDKFFPMSGVLIFGKQGAGNSNVDLDNVMITSEEEIKTTNPVATEQYGTVATNLQSSNTAPATGTVNSQGALPGMVWQNRDVYLQGPIWAKIPHTDGHFHPSPLMGGFGLKHPPPQILIKNTPVPANPPTTFSPAKFASFITQYSTGQVSVEIEWELQKENSKRWNPEIQYTSNYNKSTNVDFAVDTNGVYSEPRPIGTRYLTRNL

SEQ ID NO: 936 - protein, 736 aa, synthetic construct
  REGION 1..736: note = source = /note="Description of Artificial Sequence: Synthetic polypeptide"
MAADGYLPDWLEDNLSEGIREWWDLKPGAPKPKANQQKQDDGRGLVLPGYKYLGPFNGLDKGEPVNAADAAALEHDKAYDQQLKAGDNPYLRYNHADAEFQERLQEDTSFGGNLGRAVFQAKKRVLEPLGLVEEGAKTAPGKKRPVEQSPQEPDSSSGIGKKGQQPAKKRLNFGQTGDSESVPDPQPLGEPPAAPSGVGSNTMASGGGAPMADNNEGADGVGNASGNWHCDSTWLGDRVITTSTRTWALPTYNNHLYKQISSQSGGSTNDNTYFGYSTPWGYFDFNRFHCHFSPRDWQRLINNNWGFRPKKLNFKLFNIQVKEVTTNDGTTTIANNLTSTVQVFTDSEYQLPYVLGSAHQGCLPPFPADVFMIPQYGYLTLNNGSQAVGRSSFYCLEYFPSQMLRTGNNFEFSYTFEDVPFHSSYAHSQSLDRLMNPLIDQYLYYLSRTQTTSGTAGNRTLQFSQAGPSSMANQAKNWLPGPCYRQQRVSKTANQNNNSNFAWTGATKYHLNGRDSLVNPGPAMATHKDDEDKFFPMSGVLIFGKQGAGNSNVDLDNVMITSEEEIKTTNPVATEEYGTVATNLQSSNTAPATGTVNSQGALPGMVWQNRDVYLQGPIWAKIPHTDGHFHPSPLMGGFGLKHPPPQILIKNTPVPANPPTTFSPAKFASFITQYSTGQVSVEIEWELQKENSKRWNPEIQYTSNYNKSTNVDFAVDTNGVYSEPRPIGTRYLTRNL

SEQ ID NO: 937 - protein, 736 aa, synthetic construct
  REGION 1..736: note = source = /note="Description of Artificial Sequence: Synthetic polypeptide"
MAADGYLPDWLEDNLSEGIREWWDLKPGAPKPKANQQKQDDGRGLVLPGYKYLGPFNGLDKGEPVNAADAAALEHDKAYDQQLKAGDNPYLRYNHADAEFQERLQEDTSFGGNLGRAVFQAKKRVLEPLGLVEEGAKTAPGKKRPVEQSPQEPDSSSGIGKKGQQPAKKRLNFGQTGDSESVPDPQPLGEPPAAPSGVGSNTMASGGGAPMADNNEGADGVGNASGNWHCDSTWLGDRVITTSTRTWALPTYNNHLYKQISSQSGGSTNDNTYFGYSTPWGYFDFNRFHCHFSPRDWQRLINNNWGFRPKKLNFKLFNIQVKEVTTNDGTTTIANNLTSTVQVFTDSEYQLPYVLGSAHQGCLPPFPADVFMIPQYGYLTLNNGSQAVGRSSFYCLEYFPSQMLRTGNNFQFSYTFEDVPFHSSYAHSQSLDRLMNPLIDQYLYYLSRTQTTSGTAGNRELQFSQAGPSSMANQAKNWLPGPCYRQQRVSKTTNQNNNSNFAWTGATKYHLNGRDSLVNPGPAMATHKDDEDKFFPMSGVLIFGKQGAGNSNVDLDNVMITNEEEIKTTNPVATEQYGTVATNLQSANTAPATGTVNSQGALPGMVWQDRDVYLQGPIWAKIPHTDGHFHPSPLMGGFGLKHPPPQILIKNTPVPANPPTTFSPAKFASFITQYSTGQVSVEIEWELQKENSKRWNPEIQYTSNYNKSTNVDFAVDTNGVYSEPRPIGTRYLTRNL

SEQ ID NO: 938 - DNA, 2211 bp, synthetic construct
  misc_feature 1..2211: note = source = /note="Description of Artificial Sequence: Synthetic polynucleotide"
  source 1..2211: mol_type = other DNA
atggctgccgatggttatcttccagattggctcgaggacaacctctctgagggcattcgcgagtggtgggacttgaaacctggagccccgaaacccaaagccaaccagcaaaagcaggacgacggccggggtctggtgcttcctggctacaagtacctcggacccttcaacggactcgacaagggggagcccgtcaacgcggcggacgcagcggccctcgagcacgacaaggcctacgaccagcagctcaaagcgggtgacaatccgtacctgcggtataaccacgccgacgccgagtttcaggagcgtctgcaagaagatacgtcttttgggggcaacctcgggcgagcagtcttccaggccaagaagcgggttctcgaacctctcggtctggttgaggaaggcgctaagacggctcctggaaagaagagaccggtagagcaatcaccccaggaaccagactcctcttcgggcatcggcaagaaaggccagcagcccgcgaaaaagagactcaactttgggcagacaggcgactcagagtcagtgcccgaccctcaaccactcggagaaccccccgcagccccctctggtgtgggatctaatacaatggctgcaggcggtggcgctccaatggcagacaataacgaaggcgccgacggagtgggtaacgcctcaggaaattggcattgcgattccacatggctgggcgacagagtcatcaccaccagcacccgaacctgggccctccccacctacaacaaccacctctacaagcaaatctccagccaatcgggagcaagcaccaacgacaacacctacttcggctacagcaccccctgggggtattttgactttaacagattccactgccacttctcaccacgtgactggcagcgactcatcaacaacaactggggattccggcccaagagactcaacttcaagctcttcaacatccaggtcaaggaggtcacgacgaatgatggcaccacgaccatcgccaataaccttaccagcacggttcaggtctttacggactcggaataccagctcccgtacgtcctcggctctgcgcaccagggctgcctgcctccgttcccggcggacgtcttcatgattcctcagtacgggtacctgactctgaacaatggcagtcaggccgtgggccgttcctccttctactgcctggagtactttccttctcaaatgctgagaacgggcaacaactttgagttcagctacacgtttgaggacgtgccttttcacagcagctacgcgcacagccaaagcctggaccggctgatgaaccccctcatcgaccagtacctgtactacctgtctcggactcagaccacgagtggtaccgcaggaaatcggacgttgcaattttctcaggccgggcctagtagcatggcgaatcaggccaaaaactggctacccgggccctgctaccggcagcaacgcgtctccaagacagcgaatcaaaataacaacagcaactttgcctggaccggtgccaccaagtatcatctgaatggcagagactctctggtaaatcccggtcccgctatggcaacccacaaggacgacgaagacaaattttttccgatgagcggagtcttaatatttgggaaacagggagctggaaatagcaacgtggaccttgacaacgttatgataaccagtgaggaagaaattaaaaccaccaacccagtggccacagaacagtacggcacggtggccactaacctgcaatcgtcaaacaccgctcctgctacagggaccgtcaacagtcaaggagccttacctggcatggtctggcagaaccgggacgtgtacctgcagggtcctatctgggccaagattcctcacacggacggacactttcatccctcgccgctgatgggaggctttggactgaaacacccgcctcctcagatcctgattaagaatacacctgttcccgcgaatcctccaactaccttcagtccagctaagtttgcgtcgttcatcacgcagtacagcaccggacaggtcagcgtggaaattgaatgggagctgcagaaagaaaacagcaaacgctggaacccagagattcaatacacttccaactacaacaaatctacaaatgtggactttgctgttgacacaaatggcgtttattctgagcctcgccccatcggcacccgttacctcacccgtaatctgtaa

SEQ ID NO: 939 - protein, 738 aa, synthetic construct; identical to SEQ ID NO: 18
  REGION 1..738: note = source = /note="Description of Artificial Sequence: Synthetic polypeptide"

SEQ ID NO: 940 - DNA, 2211 bp, synthetic construct
  misc_feature 1..2211: note = source = /note="Description of Artificial Sequence: Synthetic polynucleotide"
  source 1..2211: mol_type = other DNA
atggctgccgatggttatcttccagattggctcgaggacaacctctctgagggcattcgcgagtggtgggacttgaaacctggagccccgaaacccaaagccaaccagcaaaagcaggacgacggccggggtctggtgcttcctggctacaagtacctcggacccttcaacggactcgacaagggggagcccgtcaacgcggcggacgcagcggccctcgagcacgacaaggcctacgaccagcagctcaaagcgggtgacaatccgtacctgcggtataaccacgccgacgccgagtttcaggagcgtctgcaagaagatacgtcttttgggggcaacctcgggcgagcagtcttccaggccaagaagcgggttctcgaaccttttggtctggttgaggaaggcgctaagacggctcctggaaagaaacgtccggtagagcagtcgccacaagagccagactcctcctcgggcatcggcaagacaggccagcagcccgctaaaaagagactcaattttggtcagactggcgactcagagtcagtccccgacccacaacctctcggagaacctccagcaacccccgctgctgtgggacctactacaatggcttcaggcggtggcgcaccaatggcagacaataacgaaggcgccgacggagtgggtaatgcctcaggaaattggcattgcgattccacatggctgggcgacagagtcatcaccaccagcacccgcacctgggccttgcccacctacaataaccacctctacaagcaaatctccagtgcttcaacgggggccagcaacgacaaccactacttcggctacagcaccccctgggggtattttgatttcaacagattccactgccacttttcaccgcgtgactggcagcgactcatcaacaacaattggggattccggcccaagagactcaacttcaagctcttcaacatccaagtcaaggaggtcacgacgagtgatggcgtcacaaccatcgctaataaccttaccagcacggttcaagtcttctcggactcggagtaccagcttccgtacgtcctcggctctgcgcaccagggctgcctccctccgttcccggcggacgtgttcatgattccgcaatacggctacctgacgctcaacaatggcagccaagccgtgggacgttcatccttttactgcctggaatatttcccttctcagatgctgagaacgggcaacaactttaccttcagctacacctttgaggaagtgcctttccacagcagctacgcgcacagccagagcctggaccggctgatgaatcctctcatcgaccaatacctgtattacctgaacagaactcaaaatcagtccggaagtgcccaaaacaaggacttgctgtttagccgtgggtctccagctggcatgtctgttcagcccaaaaactggctacctggaccctgttatcggcagcagcgcgtttctaaaacaaaaacaggcaacaacaacagcaattttacctggactggtgcttcaaaatataacctcaatgggcatgaatccatcatcaaccctggcactgctatggcctcacacaaagacgacgaagacaagttctttcccatgagcggtgtcatgatttttggaaaagagagcgccggagcttcaaacactgcattggacaatgtcatgattacagacgaagaggaaattaaagccactaaccctgtggccaccgaaagatttgggaccgtggcagtcaatttccagagcagcagcacacaccctgcgaccggagatgtgcatgttatgggagcattacctggcatggtgtggcaagatagagacgtgtacctgcagggtcccatctgggccaaaattcctcacacagatggacactttcacccgtctcctcttatgggcggctttggactcaagcacccgcctcctcagatcctcatcaaaaacacgcctgttcctgcgaatcctccggcggagttttcagctacaaagtttgcttcattcatcacccaatactccacaggacaagtgagtgtggaaattgaatgggagctgcagaaagaaaacagcaagcgctggaatcccgaagtgcagtacacatccaattatgcaaaatctgccaacgttgattttaccgtggacaacaatggactttatactgagcctcgccccattggcacccgttaccttacccgtcccctgtaa

SEQ ID NO: 941 - DNA, 2211 bp, synthetic construct; identical to SEQ ID NO: 940
  misc_feature 1..2211: note = source = /note="Description of Artificial Sequence: Synthetic polynucleotide"
  source 1..2211: mol_type = other DNA

SEQ ID NO: 942 - DNA, 2202 bp, synthetic construct
  misc_feature 1..2202: note = source = /note="Description of Artificial Sequence: Synthetic polynucleotide"
  source 1..2202: mol_type = other DNA
atgactgacggttaccttccagattggctagaggacaacctctctgaaggcgttcgagagtggtgggcgctgcaacctggagcccctaaacccaaggcaaatcaacaacatcaggacaacgctcggggtcttgtgcttccgggttacaaatacctcggacccggcaacggacttgacaagggggaacccgtcaacgcagcggacgcggcagccctcgaacacgacaaggcctacgaccagcagctcaaggccggtgacaacccctacctcaagtacaaccacgccgacgccgagtttcaggagcgtcttcaagaagatacgtcttttgggggcaacctcggacgagcagtcttccaggccaaaaagaggatccttgagcctctgggtctggttgaggaagcggctaagacggctcctggaaaaaagagacctgtagagcaatctccagcagaaccggactcctcttcgggcatcggcaaatcaggccagcagcccgctagaaaaagactgaattttggtcagactggcgacacagagtcagtcccagaccctcaaccactcggacaacctcccgcagccccctctggtgtgggatctactacaatggcttcaggcggtggcgcaccaatggcagacaataacgagggtgccgatggagtgggtaattcctcaggaaattggcattgcgattcccaatggctgggcgacagagtcatcaccaccagcacccgcacctgggccctgcccacctacaacaatcacctctacaagcaaatctccagccaatcaggagccaccaacgacaaccactactttggctacagcaccccctgggggtattttgacttcaacagattccactgccacttttcaccacgtgactggcaaagactcatcaacaacaactggggattccgacccaagagactcaacttcaagctctttaacattcaagtcaaagaggtcacgcagaatgacggtacgacgacgattgccaataaccttaccagcacggttcaggtgtttactgactccgagtaccagctcccgtacgtcctcggctcggcgcatcagggatgcctcccgccgttcccagcagacgtcttcatggtcccacagtatggatacctcaccctgaacaacgggagtcaggcggtaggacgctcttccttttactgcctggagtactttccttctcagatgctgcgtactggaaacaactttcagtttagctacacttttgaagacgtgcctttccacagcagctacgctcacagccaaagtctggaccgtctcatgaatcctctgatcgaccagtacctgtactatctgaacaggacacaaacagccagtggaactcagcagtctcggctactgtttagccaagctggacccaccagtatgtctcttcaagctaaaaactggctgcctggaccttgctacagacagcagcgtctgtcaaagcaggcaaacgacaacaacaacagcaactttccctggactggtgccaccaaatatcatctgaatggccgggactcattggtgaacccgggccctgctatggccagtcacaaggatgacaaagaaaagtttttccccatgcatggaaccctgatatttggtaaagaaggaacaaatgccaacaacgcggatttggaaaatgtcatgattacagatgaagaagaaatccgcaccaccaatcccgtggctacggagcagtacgggactgtgtcaaataatttgcaaaactcaaacgctggtccaactactggaactgtcaatcaccaaggagcgttacctggtatggtgtggcaggatcgagacgtgtacctgcagggacccatttgggccaagattcctcacaccgatggacactttcatccttctccactgatgggaggttttgggctcaaacacccgcctcctcagatcatgatcaaaaacactcccgttccagccaatcctcccacaaactttagtgcggcaaagtttgcttccttcatcacacagtactccacggggcaggtcagcgtggagatcgagtgggagctgcagaaggagaacagcaaacgctggaatcccgaaattcagtacacttccaactacaacaaatctgttaatgtggactttactgtggacactaatggtgtgtattcagagcctcgccccattggcaccagatacctgactcgtaatctgtaa

SEQ ID NO: 943 - DNA, 2211 bp, synthetic construct
  misc_feature 1..2211: note = source = /note="Description of Artificial Sequence: Synthetic polynucleotide"
  source 1..2211: mol_type = other DNA
atggctgccgatggttatcttccagattggctcgaggacaacctctctgagggcattcgcgagtggtgggacttgaaacctggagccccgaaacccaaagccaaccagcaaaagcaggacgacggccggggtctggtgcttcctggctacaagtacctcggacccttcaacggactcgacaagggggagcccgtcaacgcggcggacgcagcggccctcgagcacgacaaggcctacgaccagcagctcaaagcgggtgacaatccgtacctgcggtataaccacgccgacgccgagtttcaggagcgtctgcaagaagatacgtcttttgggggcaacctcgggcgagcagtcttccaggccaagaagcgggttctcgaaccttttggtctggttgaggaaggcgctaagacggctcctggaaagaaacgtccggtagagcagtcgccacaagagccagactcctcctcgggcatcggcaagacaggccagcagcccgctaaaaagagactcaattttggtcagactggcgactcagagtcagtccccgacccacaacctctcggagaacctccagcaacccccgctgctgtgggacctactacaatggcttcaggcggtggcgcaccaatggcagacaataacgaaggcgccgacggagtgggtaatgcctcaggaaattggcattgcgattccacatggctgggcgacagagtcatcaccaccagcacccgcacctgggccttgcccacctacaataaccacctctacaagcaaatctccagtgcttcaacgggggccagcaacgacaaccactacttcggctacagcaccccctgggggtattttgatttcaacagattccactgccacttttcaccacgtgactggcagcgactcatcaacaacaattggggattccggcccaagagactcaacttcaagctcttcaacatccaagtcaaggaggtcacgacgaatgatggcgtcacaaccatcgctaataaccttaccagcacggttcaagtcttctcggactcggagtaccagcttccgtacgtcctcggctctgcgcaccagggctgcctccctccgttcccggcggacgtgttcatgattccgcaatacggctacctgacgctcaacaatggcagccaagccgtgggacgttcatccttttactgcctggaatatttcccttctcagatgctgagaacgggcaacaactttaccttcagctacacctttgaggaagtgcctttccacagcagctacgcgcacagccagagcctggaccggctgatgaatcctctcatcgaccaatacctgtattacctgaacagaactcaaaatcagtccggaagtgcccaaaacaaggacttgctgtttagccgtgggtctccagctggcatgtctgttcagcccaaaaactggctacctggaccctgttatcggcagcagcgcgtttctaaaacaaaaacagacaacaacaacagcaattttacctggactggtgcttcaaaatataacctcaatgggcgtgaatccatcatcaaccctggcactgctatggcctcacacaaagacgacgaagacaagttctttcccatgagcggtgtcatgatttttggaaaagagagcgccggagcttcaaacactgcattggacaatgtcatgattacagacgaagaggaaattaaagccactaaccctgtggccaccgaaagatttgggaccgtggcagtcaatttccagagcagcagcacagaccctgcgaccggagatgtgcatgttatgggagcattacctggcatggtgtggcaagatagagacgtgtacctgcagggtcccatctgggccaaaattcctcacacagatggacactttcacccgtctcctcttatgggcggctttggactcaagcacccgcctcctcagatcctcatcaaaaacacgcctgttcctgcgaatcctccggcggagttttcagctacaaagtttgcttcattcatcacccaatactccacaggacaagtgagtgtggaaattgaatgggagctgcagaaagaaaacagcaagcgctggaatcccgaagtgcagtacacatccaattatgcaaaatctgccaacgttgattttaccgtggacaacaatggactttatactgagcctcgccccattggcacccgttaccttacccgtcccctgtaa

SEQ ID NO: 944 - DNA, 2211 bp, synthetic construct
  misc_feature 1..2211: note = source = /note="Description of Artificial Sequence: Synthetic polynucleotide"
  source 1..2211: mol_type = other DNA
atggctgccgatggttatcttccagattggctcgaggacaacctctctgagggcattcgcaagtggtgggacttgaaacctggagccccgaaacccaaagccaaccagcaaaagcaggacgacggccggggtctggtgcttcctggctacaagtacctcggacccttcaacggactcgacaagggggagcccgtcaacgcggcggacgcagcggccctcgagcacgacaaggcctacgaccagcagctcaaagcgggtgacaatccgtacctgcggtataaccacgccgacgccgagtttcaggagcgtctgcaagaagatacgtcttttgggggcaacctcgggagagcagtcttccaggccaagaagcgggttctcgaaccttttggtctggttgaggaaggcgctaagacggctcctggaaagaaacgtccggtagagcagtcgccacaagagccagactcctcctcgggcatcggcaagacaggccagcagcccgctaaaaagagactcaattttggtcagactggcgactcagagtcagtccccgacccacaacctctcggagaacctccagcaacccccgctgctgtgggacctactacaatggcttcaggcggtggcgcaccaatggcagacaataacgaaggcgccgacggagtgggtaatgcctcaggaaattggcattgcgattccacatggctgggcgacagagtcatcaccaccagcacccgcacctgggccttgcccacctacaataaccacctctacaagcaaatctccagtgcttcaacgggggccagcaacgacaaccactacttcggctacagcaccccctgggggtattttgatttcaacagattccactgccacttttcaccacgtgactggcagcgactcatcaacaacaattggggattccggcccaagagactcaacttcaagctcttcaacatccaagtcaaggaggtcacgacgaatgatggcgtcacaaccatcgctaataaccttaccagcacggttcaagtcttctcggactcggagtaccagcttccgtacgtcctcggctctgcgcaccagggctgcctccctccgttcccggcggacgtgttcatgattccgcaatacggctacctgacgctcaacaatggcagccaagccgtgggacgttcatccttttactgcctggaatatttcccttctcagatgctgagaacgggcaacaactttaccttcagctacacctttgaggaagtgcctttccacagcagctacgcgcacagccagagcctggaccggctgatgaatcctctcatcgaccaatacctgtattacctgaacagaactcaaaatcagtccggaagtgcccaaaacaaggacttgctgtttagccgtgggtctccagctggcatgtctgttcagcccaaaaactggctacctggaccctgttatcggcagcagcgcgtttctaaaacaaaaacagacaacaacaacagcaattttacctggactggtgcttcaaaatataacctcaatgggcgtgaatccatcatcaaccctggcactgctatggcctcacacaaagacgacaaagacaagttctttcccatgagcggtgtcatgatttttggaaaagagagcgccggagcttcaaacactgcattggacaatgtcatgattacagacgaagaggaaattaaagccactaaccctgtggccaccgaaagatttgggaccgtggcagtcaatttccagagcagcagcacagaccctgcgaccggagatgtgcatgttatgggagcattacctggcatggtgtggcaagatagagacgtgtacctgcagggtcccatttgggccaaaattcctcacacagatggacactttcacccgtctcctcttatgggcggctttggactcaagcacccgcctcctcagatcctcatcaaaaacacacctgttcctgcgaatcctccggcggagttttcagctacaaagtttgcttcattcatcacccaatactccacaggacaagtgagtgtggaaattgaatgggagctgcagaaagaaaacagcaagcgctggaatcccgaagtgcagtacacatccaattatgcaaaatctgccaacgttgattttaccgtggacaacaatggactttatactgagcctcgccccattggcacccgttaccttacccgtcccctgtaa

SEQ ID NO: 945 - DNA, 2211 bp, synthetic construct
  misc_feature 1..2211: note = source = /note="Description of Artificial Sequence: Synthetic polynucleotide"
  source 1..2211: mol_type = other DNA
atggctgccgatggttatcttccagattggctcgaggacaacctctctgagggcattcgcgagtggtgggacttgaaacctggagccccgaaacccaaagccaaccagcaaaagcaggacaacggccggggtctggtgcttcctggctacaagtacctcggacccttcaacggactcgacaagggggagcccgtcaacgcggcggacgcagcggccctcgagcacgacaaggcctacgaccagcagctcaaagcgggtgacaatccgtacctgcggtataaccacgccgacgccgagtttcaggagcgtctgcaagaagatacgtcttttgggggcaacctcgggcgagcagtcttccaggccaagaagcgggttctcgaaccttttggtctggttgaggaaggcgctaagacggctcctggaaagaaacgtccggtagagcagtcgccacaagagccagactcctcctcgggcatcggcaagacaggccagcagcccgctaaaaagagactcaattttggtcagactggcgactcagagtcagtccccgacccacaacctctcggagaacctccagcaacccccgctgctgtgggacctactacaatggcttcaggcggtggcgcaccaatggcagacaataacgaaggcgccgacggagtgggtaatgcctcaggaaattggcattgcgattccacatggctgggcgacagagtcatcaccaccagcacccgcacctgggccttgcccacctacaataaccacctctacaagcaaatctccagtgcttcaacgggggccagcaacgacaaccactacttcggctacagcaccccctgggggtattttgatttcaacagattccactgccacttttcaccacgtgactggcagcgactcatcaacaacaattggggattccggcccaagagactcaacttcaagctcttcaacatccaagtcaaggaggtcacgacgaatgatggcgtcacaaccatcgctaataaccttaccagcacggttcaagtcttctcggactcggagtaccagcttccgtacgtcctcggctctgcgcaccagggctgcctccctccgttcccggcggacgtgttcatgattccgcaatacggctacctgacgctcaacaatggcagccaagccgtgggacgttcatccttttactgcctggaatatttcccttctcagatgctgagaacgggcaacaactttaccttcagctacacctttgaggaagtgcctttccacagcagctacgcgcacagccagagcctggaccggctgatgaatcctctcatcgaccaatacctgtattacctgaacagaactcaaaatcagtccggaagtgcccaaaacaaggacttgctgtttagccgtgggtctccagctggcatgtctgttcagcccaaaaactggctacctggaccctgttatcggcagcagcgcgtttctaaaacaaaaacagacaacaacaacagcaattttacctggactggtgcttcaaaatataacctcaatgggcgtgaatccatcatcaaccctggcactgctatggcctcacacaaagacgacgaagacaagttctttcccatgagcggtgtcatgatttttggaaaagagagcgccggagcttcaaacactgcattggacaatgtcatgattacagacgaagaggaaattaaagccactaaccctgtggccaccgaaagatttgggaccgtggcagtcaatttccagagcagcagcacacaccctgcgaccggagatgtgcatgttatgggagcattacctggcatggtgtggcaagatagagacgtgtacctgcagggtcccatctgggccaaaattcctcacacagatggacactttcacccgtctcctcttatgggcggctttggactcaagcacccgcctcctcagatcctcatcaaaaacacgcctgttcctgcgaatcctccggcggagttttcagctacaaagtttgcttcattcatcacccaatactccacaggacaagtgagtgtggaaattgaatgggagctgcagaaagaaaacagcaagcgctggaatcccgaagtgcagtacacatccaattatgcaaaatctgccaacgttgattttaccgtggacaacaatggactttatactgagcctcgccccattggcacccgttaccttacccgtcccctgtaa

SEQ ID NO: 946 - DNA, 2211 bp, synthetic construct
  misc_feature 1..2211: note = source = /note="Description of Artificial Sequence: Synthetic polynucleotide"
  source 1..2211: mol_type = other DNA
atggctgccgatggttatcttccagattggctcgaggacaacctctctgagggcattcgcgagtggtgggacttgaaacctggagccccgaaacccaaagccaaccagcaaaagcaggacgacggccggggtctggtgcttcctggctacaagtacctcggacccttcaacggactcgacaagggggagcccgtcaacgcggcggacgcagcggccctcgagcacgacaaggcctacgaccagcagctcaaagcgggtgacaatccgtacctgcggtataaccacgccgacgccgagtttcaggagcgtctgcaagaagatacgtcttttgggggcaacctcgggcgagcagtcttccaggccaaaaagcgggttctcgaaccttttggtctggttgaggaaggcgctaagacggctcctggaaagaaacgtccggtagagcagtcgccacaagagccagactcctcctcgggcatcggcaagacaggccagcagcccgctaaaaagagactcaattttggtcagactggcgactcagagtcagtccccgacccacaacctctcggagaacctccagcaacccccgctgctgtgggacctactacaatggcttcaggcggtggcgcaccaatggcagacaataacgaaggcgccgacggagtgggtaatgcctcaggaaattggcattgcgattccacatggctgggcgacagagtcatcaccaccagcacccgcacctgggccttgcccacctacaataaccacctctacaagcaaatctccagtgcttcaacgggggccagcaacgacaaccactacttcggctacagcaccccctgggggtattttgatttcaacagattccactgccacttttcaccacgtgactggcagcgactcatcaacaacaattggggattccggcccaagagactcaacttcaagctcttcaacatccaagtcaaggaggtcacgacgaatgatggcgtcacaaccatcgctaataaccttaccagcacggttcaagtcttctcggactcggagtaccagcttccgtacgtcctcggctctgcgcaccagggctgcctccctccgttcccggcggacgtgttcatgattccgcaatacggctacctgacgctcaacaatggcagccaagccgtgggacgttcatccttttattgcctggaatatttcccatcgcagatgctgagaacgggcaataactttaccttcagctacacctttgaggacgtgcctttccacagcagctacgcgcacagccagagcctggaccggctgatgaatcctctcatcgaccagtacctgtattacctgaacagaactcagaaccagtccggaagtgcccaaaacaaggacttgctgtttagccgggggtctccagctggcatgtctgttcagctcaaaaactggctacctggaccctgttatcggcagcagcgcgtttctaaaacaaaaacagacaacaacaacagcaattttacctggactggtgcttcaaaatataaccttaatgggcgtgaatccatcatcaaccctggcactgctatggcctcacacaaagacgacgaagacaagttctttcccatgagcggtgtcatgatttttggaaaagagagcgccggagcttcaaacactgcattggacaatgtcatgattacagacgaagaggaaattaaagccactaaccctgtggccaccgaaagatttgggaccgtggcagtcaatttccagagcagcagcacagaccctgcgaccggagatgtgcatgttatgggagcattacctggcatggtgtggcaagatagagacgtgtacctgcagggtcccatttgggccaaaattcctcacacagatggacactttcacccgtctcctcttatgggcggctttggactcaaacacccgcctcctcagatcctcatcaaaaacacacctgttcctgcgaatcctccggcggagttttcagctacaaagtttgcttcattcatcacccaatactccacaggacaagtgagcgtggaaattgaatgggagctgcagaaagaaaacagcaagcgctggaatcccgaagtgcagtacacatccaattatgcaaaatctgccaacgttgattttaccgtggacaacaatggactttatactgagcctcgccccattggcacccgttaccttacccgtcccctgtaa

SEQ ID NO: 947 - DNA, 2211 bp, synthetic construct
  misc_feature 1..2211: note = source = /note="Description of Artificial Sequence: Synthetic polynucleotide"
  source 1..2211: mol_type = other DNA
atggctgccgatggttatcttccagattggctcgaggacaacctctctgagggcattcgcgagtggtgggacttgaaacctggagccccgaaacccaaagccaaccagcaaaagcaggacgacggccggggtctggtgcttcctggctacaagtacctcggacccttcaacggactcgacaagggggagcccgtcaacgcggcggacgcagcggccctcgagcacgacaaggcctacgaccagcagctcaaagcgggtgacaatccgtacctgcggtataaccacgccgacgccgagtttcaggagcgtctgcaagaagatacgtcttttgggggcaacctcgggcgagcagtcttccaggccaagaagcgggttctcgaaccttttggtctggttgaggaaggtgctaagacggctcctggaaagaagagaccggtagagcagtcgccccaagaaccagactcctcatcgggcatcggcaaatcaggccagcagcccgctaaaaagagactcaattttggtcagactggcgactcagagtcagtccccgacccacaacctctcggagaacctccagcaacccccgctgctgtgggacctactacaatggcttcaggcggtggcgcaccaatggcagacaataacgaaggcgccgacggagtgggtaatgcctcaggaaattggcattgcgattccacatggctgggcgacagagtcattaccaccagcacccgaacctgggccctgcccacctataacaaccacctctacaaacaaatctccagcgcttcaacgggggccagcaacgacaaccactacttcggctacagcaccccctgggggtattttgattttaacagattccactgccacttctcaccacgtgactggcagcgactcatcaacaacaattggggattccggcccaagagactcaacttcaagctcttcaacatccaagtcaaggaggtcacgacgaacgatggcgtcacgaccatcgctaataaccttaccagcacggttcaagtcttctcggactcggagtaccagttgccgtacgtcctcggctctgcgcaccagggctgcctccctccgttcccggcggacgtgttcatgattccgcagtacggctacctaacactcaacaatggcagccaggccgtgggacgttcatccttttactgcctggaatatttcccatcgcagatgctgagaacgggcaataactttaccttcagctacacattcgaggacgtgcctttccacagcagctacgcgcacagccaaagcctggaccggctgatgaatcctctcatcgaccagtacttgtattacctaaacagaactcaaaatcagtccggaagtgcccaaaacaaggacttgctgtttagccgggggtctccagctggcatgtctgttcagcccaaaaactggctacctggaccctgttatcggcagcagcgcgtttctaaaacaaaaacagacaacaacaacagcaactttacctggactggtgcttcaaaatataaccttaatgggcgtgaatctataatcaaccctggcactgctatggcttcacacaaagacgacgaagacaagttctttccaatgagcggtgtcatgatttttggcaaggagagcgccggagcttcaaacactgcattggacaatgtcatgattacagacgaagaggaaattaaagccactaaccctgtggccaccgaaagatttgggaccgtggcagtcaatttccagagcagcagcacagaccctgcgaccggagatgtgcatgttatgggagcattacctggcatggtgtggcaagatagagacgtgtacctgcagggtccaatttgggccaaaattcctcacacagatggacactttcacccgtctcctcttatgggcggctttggacttaagcacccgcctcctcagatcctcatcaaaaacacgcctgttcctgcgaatcctccggcagagttttcggctacaaagtttgcttcattcatcacccagtattccacaggacaagtgagtgtggaaattgaatgggagttgcagaaagaaaacagcaagcgttggaatcccgaagtgcagtacacatctaattatgcaaaatctgccaacgttgatttcactgtggacaacaatggactttatactgagcctcgccccattggcacccgttacctcacccgtcccctgtaa

SEQ ID NO: 948 - DNA, 2211 bp, synthetic construct
  misc_feature 1..2211: note = source = /note="Description of Artificial Sequence: Synthetic polynucleotide"
  source 1..2211: mol_type = other DNA
atggctgccgatggttatcttccagattggctcgaggacaacctctctgagggcattcgcgagtggtgggacttgaaacctggagccccgaaacccaaagccaaccagcaaaagcaggacgacggccggggtctggtgcttcctggctacaagtacctcggacccttcaacggactcgacaagggggagcccgtcaacgcggcggacgcagcggccctcgagcacgacaaggcctacgaccagcagctcaaagcgggtgacaatccgtacctgcggtataaccacgccgacgccgagtttcaggagcgtctgcaagaagatacgtcttttgggggcaacctcgggcgagcagtcttccaggccaagaagagggttctcgaaccttttggtctggttgaggaaggtgctaagacggctcctggaaagaaacgtccggtagagcagtcaccccaagaaccagactcctcctcgggcattggcaaatcaggccagcagcccgctaaaaagagactcaattttggtcagactggcgactcagagtcagtccccgacccacaacctctcggagaacctccagcaacccccgctgctttgggacctactacaatggcttcaggcggtggcgcaccaatggcagacaataacgaaggcgccgacggagtgggtaatgcctcaggaaattggcattgcgattccacatggctgggcgacagagtcatcaccaccagcacccgcacctgggccttgcccacctacaataaccacctctacaagcaaatctccagtgcttcaacgggggccagcaacgacaaccactacttcggctacagcaccccctgggggtattttgatttcaacagattccactgccatttctcaccacgtgactggcagcgactcatcaacaacaactggggattccggcccaagagactcaacttcaagctcttcaacatccaagtcaaggaggtcacgacgaacgatggcgtcacgaccatcgctaataaccttaccagcacggttcaagtcttctcggactcggagtaccagcttccgtacgtcctcggctctgcgcaccagggctgcctccctccgttcccggcggacgtgttcatgattccgcagtacggctacctgacgctcaacaatggcagcaaagccgtgggacgttcatccttttactgcctggaatatttcccttctcagatgctgagaacgggcaacaactttaccttcagctacacctttgaggaagtgcctttccacagcagctacgcgcacagccagagcctggaccggctgatgaatcctctcatcgaccaatacctgtattacctgaacagaactcaaaatcagtccggaagtgcccaaaacaaggacttgctgtttagccgtgggtctccagctggcatgtctgttcagcccaaaaactggctacctggaccctgttatcggcagcagcgcgtttctaaaacaaaaacagacaacaacaacagcaattttacctggactggtgcttcaaaatataacctcaatgggcgtgaatccatcatcaaccctggcactgctatggcctcacacaaagacgacgaagacaagttctttcccatgagcggtgtcatgatttttggaaaagagagcgccggagcttcaaacactgcattggacaatgtcatgattacagacgaagaggaaattaaagccactaaccctgtggccaccgaaagatttgggaccgtggcagtcaatttccagagcagcagcacagaccctgcgaccggagatgtgcatgttatgggagcattacctggcatggtgtggcaagatagagacgtgtacctgcagggtcccatttgggccaaaattcctcacacggatggacactttcacccgtctcctcttatgggcggctttggactcaagcacccgcctcctcagatcctcatcaaaaacacacctgttcctgcgaatcctccggcagagttttcggctacaaagtttgcttcattcatcacccagtactccacaggacaagtgagcgtggaaattgaatgggagttgcagaaagaaaacagtaagcgctggaatcccgaagtgcagtacacatctaattatgcaaaatctgccaacgttgacttcactgtggacaacaatggactttatactgagcctcgccccattggcacccgttacctcacccgtcccctgtaa

SEQ ID NO: 949 - DNA, 2970 bp, synthetic construct
  misc_feature 1..2970: note = source = /note="Description of Artificial Sequence: Synthetic polynucleotide"
  source 1..2970: mol_type = other DNA
agatgaccgccaaggtcgtagagtccgccaaggccattctgggcggcagcaaggtgcgcgtggaccaaaaatgcaaggcctctgcgcagatcgaccccacccccgtgatcgtcacctccaacaccaacatgtgcgccgtgattgacgggaacagcaccaccttcgagcaccagcagcccctgcaggaccggatgttcaagtttgaactcacccgccgcctcgactacgactttggcaaggtcaccaagcaggaagtcaaggactttttccggtgggcggctgatcacgtgactgacgtggctcatgagttttacgtcacaaagggtggagctaagaaaaggcccgccccctctgacgaggatataagcgagcccaagcggccgcgcgtgtcatttgcgcagccggagacgtcagacgcggaagctcccggagacttcgccgacaggtaccaaaacaaatgttctcgtcacgcgggtatgctgcagatgctctttccctgcaagacgtgcgagagaatgaatcagaattccaacgtctgcttcacgcacggtcagaaagattgcggggagtgctttcccgggtcagaatctcaaccggtttctgtcgtcagaaaaacgtatcagaaactgtgcatccttcatcagctccggggggcacccgagatcgcctgctctgcttgcgaccaactcaaccccgatttggacgattgccaatttgagcaataaatgactgaaatcaggtatggctgctgacggttatcttccagattggctcgaggacaacctctctgaaggcattcgcgagtggtgggcgctgaaacctggagctccacaacccaaggccaaccaacagcatcaggacaacggcaggggtcttgtgcttcctgggtacaagtacctcggacccttcaacggactcgacaagggagagccggtcaacgaggcagacgccgcggccctcgagcacgacaaggcctacgacaagcagctcgagcagggggacaacccgtatctcaagtacaaccacggcgacgccgagttccagcagcgcttggcgaccgacacctcttttgggggcaacctcgggcgagcagtcttccaggccaaaaagaggattctcgagcctctgggtctggttgaagagggcgttaaaacggctcctggaaagaaacgcccattagaaaagactccaaatcggccgaccaacccggactctgggaaggccccggccaagaaaaagcaaaaagacggcgaaccagccgactctgctagaaggacactcgactttgaagactctggagcaggagacggaccccctgagggatcatcttccggagaaatgtctcatgatgctgagatgcgtgcggcgccaggcggaaatgctgtcgaggcgggacaaggtgccgatggagtgggtaatgcctccggtgattggcattgcgattccacctggtcagagggccgagtcaccaccaccagcacccgaacctgggtcctacccacgtacaacaaccacctgtacctgcgaatcggaacaacggccaacagcaacacctacaacggattctccaccccctggggatactttgactttaaccgcttccactgccacttttccccacgcgactggcagcgactcatcaacaacaactggggactcaggccgaaatcgatgcgtgttaaaatcttcaacatacaggtcaaggaggtcacgacgtcaaacggcgagactacggtcgctaataaccttaccagcacggttcagatctttgcggattcgacgtatgaactcccatacgtgatggacgccggtcaggaggggagctttcctccgtttcccaacgacgtctttatggttccccaatacggatactgcggagttgtcactggaaaaaaccagaaccagacagacagaaatgccttttactgcctggaatactttccatcccaaatgctaagaactggcaacaattttgaagtcagttaccaatttgaaaaagttcctttccattcaatgtacgcgcacagccagagcctggacagaatgatgaatcctttactggatcagtacctgtggcatctgcaatcgaccactaccggaaattcccttaatcaaggaacagctaccaccacgtacgggaaaattaccactggagactttgcctactacaggaaaaactggttgcctggagcctgcattaaacaacaaaaattttcaaagaatgccaatcaaaactacaagattcccgccagcgggggagacgcccttttaaagtatgacacgcataccactctaaatgggcgatggagtaacatggctcctggacctccaatggcaaccgcaggtgccggggactcggattttagcaacagccagctgatctttgccggacccaatccgagcggtaacacgaccacatcttcaaacaatttgttgtttacctcagaagaggagattgccacaacaaacccacgagacacggacatgtttggacagattgcagataataatcaaaatgccaccaccgcccctcacatcgctaacctggacgctatgggaattgttcccggaatggtctggcaaaacagagacatctactaccagggccctatttgggccaaggtccctcacacggacggacactttcacccttcgccgctgatgggaggatttggactgaaacacccgcctccacagattttcatcaaaaacacccccgtacccgccaatcccaatactacctttagcgctgcaaggattaattcttttctgacgcagtacagcaccggacaagttgccgttcagatcgactgggaaattcagaaggagcattccaaacgctggaatcccgaagttcaatttacttcaaactacggcactcaaaattctatgctgtgggctcccgacaatgctggcaactaccacgaactccgggctattgggtcccgtttcctcacccaccacttgtaa

SEQ ID NO: 950 - protein, 736 aa, synthetic construct
  REGION 1..736: note = source = /note="Description of Artificial Sequence: Synthetic polypeptide"
MAADGYLPDWLEDNLSEGIREWWDLKPGAPKPKANQQKQDDGRGLVLPGYKYLGPFNGLDKGEPVNAADAAALEHDKAYDQQLKAGDNPYLRYNHADAEFQERLQEDTSFGGNLGRAVFQAKKRVLEPFGLVEEGAKTAPGKKRPVEQSPQEPDSSSGIGKTGQQPAKKRLNFGQTGDSESVPDPQPLGEPPATPAAVGPTTMASGGGAPMADNNEGADGVGNASGNWHCDSTWLGDRVITTSTRTWALPTYNNHLYKQISSASTGASNDNHYFGYSTPWGYFDFNRFHCHFSPRDWQRLINNNWGFRPKRLNFKLFNIQVKEVTTSDGVTTIANNLTSTVQVFSDSEYQLPYVLGSAHQGCLPPFPADVFMIPQYGYLTLNNGSQAVGRSSFYCLEYFPSQMLRTGNNFTFSYTFEEVPFHSSYAHSQSLDRLMNPLIDQYLYYLNRTQNQSGSAQNKDLLFSRGSPAGMSVQPKNWLPGPCYRQQRVSKTKTGNNNSNFTWTGASKYNLNGHESIINPGTAMASHKDDEDKFFPMSGVMIFGKESAGASNTALDNVMITDEEEIKATNPVATERFGTVAVNFQSSSTHPATGDVHVMGALPGMVWQDRDVYLQGPIWAKIPHTDGHFHPSPLMGGFGLKHPPPQILIKNTPVPANPPAEFSATKFASFITQYSTGQVSVEIEWELQKENSKRWNPEVQYTSNYAKSANVDFTVDNNGLYTEPRPIGTRYLTRPL

SEQ ID NO: 951 - protein, 736 aa, synthetic construct; identical to SEQ ID NO: 950
  REGION 1..736: note = source = /note="Description of Artificial Sequence: Synthetic polypeptide"

SEQ ID NO: 952 - protein, 733 aa, synthetic construct
  REGION 1..733: note = source = /note="Description of Artificial Sequence: Synthetic polypeptide"
MTDGYLPDWLEDNLSEGVREWWALQPGAPKPKANQQHQDNARGLVLPGYKYLGPGNGLDKGEPVNAADAAALEHDKAYDQQLKAGDNPYLKYNHADAEFQERLQEDTSFGGNLGRAVFQAKKRILEPLGLVEEAAKTAPGKKRPVEQSPAEPDSSSGIGKSGQQPARKRLNFGQTGDTESVPDPQPLGQPPAAPSGVGSTTMASGGGAPMADNNEGADGVGNSSGNWHCDSQWLGDRVITTSTRTWALPTYNNHLYKQISSQSGATNDNHYFGYSTPWGYFDFNRFHCHFSPRDWQRLINNNWGFRPKRLNFKLFNIQVKEVTQNDGTTTIANNLTSTVQVFTDSEYQLPYVLGSAHQGCLPPFPADVFMVPQYGYLTLNNGSQAVGRSSFYCLEYFPSQMLRTGNNFQFSYTFEDVPFHSSYAHSQSLDRLMNPLIDQYLYYLNRTQTASGTQQSRLLFSQAGPTSMSLQAKNWLPGPCYRQQRLSKQANDNNNSNFPWTGATKYHLNGRDSLVNPGPAMASHKDDKEKFFPMHGTLIFGKEGTNANNADLENVMITDEEEIRTTNPVATEQYGTVSNNLQNSNAGPTTGTVNHQGALPGMVWQDRDVYLQGPIWAKIPHTDGHFHPSPLMGGFGLKHPPPQIMIKNTPVPANPPTNFSAAKFASFITQYSTGQVSVEIEWELQKENSKRWNPEIQYTSNYNKSVNVDFTVDTNGVYSEPRPIGTRYLTRNL

SEQ ID NO: 953 - protein, 736 aa, synthetic construct; identical to SEQ ID NO: 768
  REGION 1..736: note = source = /note="Description of Artificial Sequence: Synthetic polypeptide"

SEQ ID NO: 954 - protein, 736 aa, synthetic construct
  REGION 1..736: note = source = /note="Description of Artificial Sequence: Synthetic polypeptide"
MAADGYLPDWLEDNLSEGIRKWWDLKPGAPKPKANQQKQDDGRGLVLPGYKYLGPFNGLDKGEPVNAADAAALEHDKAYDQQLKAGDNPYLRYNHADAEFQERLQEDTSFGGNLGRAVFQAKKRVLEPFGLVEEGAKTAPGKKRPVEQSPQEPDSSSGIGKTGQQPAKKRLNFGQTGDSESVPDPQPLGEPPATPAAVGPTTMASGGGAPMADNNEGADGVGNASGNWHCDSTWLGDRVITTSTRTWALPTYNNHLYKQISSASTGASNDNHYFGYSTPWGYFDFNRFHCHFSPRDWQRLINNNWGFRPKRLNFKLFNIQVKEVTTNDGVTTIANNLTSTVQVFSDSEYQLPYVLGSAHQGCLPPFPADVFMIPQYGYLTLNNGSQAVGRSSFYCLEYFPSQMLRTGNNFTFSYTFEEVPFHSSYAHSQSLDRLMNPLIDQYLYYLNRTQNQSGSAQNKDLLFSRGSPAGMSVQPKNWLPGPCYRQQRVSKTKTDNNNSNFTWTGASKYNLNGRESIINPGTAMASHKDDKDKFFPMSGVMIFGKESAGASNTALDNVMITDEEEIKATNPVATERFGTVAVNFQSSSTDPATGDVHVMGALPGMVWQDRDVYLQGPIWAKIPHTDGHFHPSPLMGGFGLKHPPPQILIKNTPVPANPPAEFSATKFASFITQYSTGQVSVEIEWELQKENSKRWNPEVQYTSNYAKSANVDFTVDNNGLYTEPRPIGTRYLTRPL

SEQ ID NO: 955 - protein, 736 aa, synthetic construct
  REGION 1..736: note = source = /note="Description of Artificial Sequence: Synthetic polypeptide"
MAADGYLPDWLEDNLSEGIREWWDLKPGAPKPKANQQKQDNGRGLVLPGYKYLGPFNGLDKGEPVNAADAAALEHDKAYDQQLKAGDNPYLRYNHADAEFQERLQEDTSFGGNLGRAVFQAKKRVLEPFGLVEEGAKTAPGKKRPVEQSPQEPDSSSGIGKTGQQPAKKRLNFGQTGDSESVPDPQPLGEPPATPAAVGPTTMASGGGAPMADNNEGADGVGNASGNWHCDSTWLGDRVITTSTRTWALPTYNNHLYKQISSASTGASNDNHYFGYSTPWGYFDFNRFHCHFSPRDWQRLINNNWGFRPKRLNFKLFNIQVKEVTTNDGVTTIANNLTSTVQVFSDSEYQLPYVLGSAHQGCLPPFPADVFMIPQYGYLTLNNGSQAVGRSSFYCLEYFPSQMLRTGNNFTFSYTFEEVPFHSSYAHSQSLDRLMNPLIDQYLYYLNRTQNQSGSAQNKDLLFSRGSPAGMSVQPKNWLPGPCYRQQRVSKTKTDNNNSNFTWTGASKYNLNGRESIINPGTAMASHKDDEDKFFPMSGVMIFGKESAGASNTALDNVMITDEEEIKATNPVATERFGTVAVNFQSSSTHPATGDVHVMGALPGMVWQDRDVYLQGPIWAKIPHTDGHFHPSPLMGGFGLKHPPPQILIKNTPVPANPPAEFSATKFASFITQYSTGQVSVEIEWELQKENSKRWNPEVQYTSNYAKSANVDFTVDNNGLYTEPRPIGTRYLTRPL

SEQ ID NO: 956 - protein, 736 aa, synthetic construct
  REGION 1..736: note = source = /note="Description of Artificial Sequence: Synthetic polypeptide"
MAADGYLPDWLEDNLSEGIREWWDLKPGAPKPKANQQKQDDGRGLVLPGYKYLGPFNGLDKGEPVNAADAAALEHDKAYDQQLKAGDNPYLRYNHADAEFQERLQEDTSFGGNLGRAVFQAKKRVLEPFGLVEEGAKTAPGKKRPVEQSPQEPDSSSGIGKTGQQPAKKRLNFGQTGDSESVPDPQPLGEPPATPAAVGPTTMASGGGAPMADNNEGADGVGNASGNWHCDSTWLGDRVITTSTRTWALPTYNNHLYKQISSASTGASNDNHYFGYSTPWGYFDFNRFHCHFSPRDWQRLINNNWGFRPKRLNFKLFNIQVKEVTTNDGVTTIANNLTSTVQVFSDSEYQLPYVLGSAHQGCLPPFPADVFMIPQYGYLTLNNGSQAVGRSSFYCLEYFPSQMLRTGNNFTFSYTFEDVPFHSSYAHSQSLDRLMNPLIDQYLYYLNRTQNQSGSAQNKDLLFSRGSPAGMSVQLKNWLPGPCYRQQRVSKTKTDNNNSNFTWTGASKYNLNGRESIINPGTAMASHKDDEDKFFPMSGVMIFGKESAGASNTALDNVMITDEEEIKATNPVATERFGTVAVNFQSSSTDPATGDVHVMGALPGMVWQDRDVYLQGPIWAKIPHTDGHFHPSPLMGGFGLKHPPPQILIKNTPVPANPPAEFSATKFASFITQYSTGQVSVEIEWELQKENSKRWNPEVQYTSNYAKSANVDFTVDNNGLYTEPRPIGTRYLTRPL

SEQ ID NO: 957 - protein, 736 aa, synthetic construct
  REGION 1..736: note = source = /note="Description of Artificial Sequence: Synthetic polypeptide"
MAADGYLPDWLEDNLSEGIREWWDLKPGAPKPKANQQKQDDGRGLVLPGYKYLGPFNGLDKGEPVNAADAAALEHDKAYDQQLKAGDNPYLRYNHADAEFQERLQEDTSFGGNLGRAVFQAKKRVLEPFGLVEEGAKTAPGKKRPVEQSPQEPDSSSGIGKSGQQPAKKRLNFGQTGDSESVPDPQPLGEPPATPAAVGPTTMASGGGAPMADNNEGADGVGNASGNWHCDSTWLGDRVITTSTRTWALPTYNNHLYKQISSASTGASNDNHYFGYSTPWGYFDFNRFHCHFSPRDWQRLINNNWGFRPKRLNFKLFNIQVKEVTTNDGVTTIANNLTSTVQVFSDSEYQLPYVLGSAHQGCLPPFPADVFMIPQYGYLTLNNGSQAVGRSSFYCLEYFPSQMLRTGNNFTFSYTFEDVPFHSSYAHSQSLDRLMNPLIDQYLYYLNRTQNQSGSAQNKDLLFSRGSPAGMSVQPKNWLPGPCYRQQRVSKTKTDNNNSNFTWTGASKYNLNGRESIINPGTAMASHKDDEDKFFPMSGVMIFGKGSAGASNTALDNVMITDEEEIKATNPVATERFGTVAVNFQSSSTDPATGDVHVMGALPGMVWQDRDVYLQGPIWAKIPHTDGHFHPSPLMGGFGLKHPPPQILIKNTPVPANPPAEFSATKFASFITQYSTGQVSVEIEWELQKENSKRWNPEVQYTSNYAKSANVDFTVDNNGLYTEPRPIGTRYLTRPL

SEQ ID NO: 958 - protein, 736 aa, synthetic construct; identical to SEQ ID NO: 699
  REGION 1..736: note = source = /note="Description of Artificial Sequence: Synthetic polypeptide"

SEQ ID NO: 959 - protein, 742 aa, synthetic construct
  REGION 1..742: note = source = /note="Description of Artificial Sequence: Synthetic polypeptide"
MAADGYLPDWLEDNLSEGIREWWALKPGAPQPKANQQHQDNGRGLVLPGYKYLGPFNGLDKGEPVNEADAAALEHDKAYDKQLEQGDNPYLKYNHADAEFQQRLATDTSFGGNLGRAVFQAKKRILEPLGLVEEGVKTAPGKKRPLEKTPNRPTNPDSGKAPAKKKQKDGEPADSARRTLDFEDSGAGDGPPEGSSSGEMSHDAEMRAAPGGNAVEAGQGADGVGNASGDWHCDSTWSEGRVTTTSTRTWVLPTYNNHLYLRIGTTANSNTYNGFSTPWGYFDFNRFHCHFSPRDWQRLINNNWGLRPKSMRVKIFNIQVKEVTTSNGETTVANNLTSTVQIFADSTYELPYVMDAGQEGSFPPFPNDVFMVPQYGYCGVVTGKNQNQTDRNAFYCLEYFPSQMLRTGNNFEVSYQFEKVPFHSMYAHSQSLDRMMNPLLDQYLWHLQSTTTGNSLNQGTATTTYGKITTGDFAYYRKNWLPGACIKQQKFSKNANQNYKIPASGGDALLKYDTHTTLNGRWSNMAPGPPMATAGAGDSDFSNSQLIFAGPNPSGNTTTSSNNLLFTSEEEIATTNPRDTDMFGQIADNNQNATTAPHIANLDAMGIVPGMVWQNRDIYYQGPIWAKVPHTDGHFHPSPLMGGFGLKHPPPQIFIKNTPVPANPNTTFSAARINSFLTQYSTGQVAVQIDWEIQKEHSKRWNPEVQFTSNYGTQNSMLWAPDNAGNYHELRAIGSRFLTHHL

SEQ ID NO: 960 - DNA, 2211 bp, synthetic construct
  misc_feature 1..2211: note = source = /note="Description of Artificial Sequence: Synthetic polynucleotide"
  source 1..2211: mol_type = other DNA
atggctgccgatggttatcttccagattggctcgaggacaacctctctgagggcattcgcgagtggtgggacttgaaacctggagccccgaagcccaaagccaaccagcaaaagcaggacgacggccggggtctggtgcttcctggctacaagtacctcggacccttcaacggactcgacaagggggagcccgtcaacgcggcggacgcagcggccctcgagcacgacaaggcctacgaccagcagctcaaagcgggtgacaatccgtacctgcggtataaccacgccgacgccgagtttcaggagcgtctgcaagaagatacgtcttttgggggcaacctcgggcgagcagtcttccaggccaagaagcgggttctcgaacctctcggtctggttgaggaaggcgctaaggcggctcctggaaagaaacgtccggtagagcagtcgccacaagagccagactcctcctcgggcatcggcaagacaggccagcagcccgctaaaaagagactcaattttggtcagactggcgactcagagtcagtccccgatccacaacctctcggagaacctccagcagccccctcaggtctgggacctaatacaatggcttcaggcggtggcgctccaatggcagacaataacgaaggcgccgacggagtgggtaattcctcgggaaattggcattgcgattccacatggctgggggacagagtcatcaccaccagcacccgaacctgggccctgcccacctacaacaaccacctctacaagcaaatctccaacggcacctcgggaggaagcaccaacgacaacacctattttggctacagcaccccctgggggtattttgacttcaacagattccactgtcacttttcaccacgtgactggcaacgactcatcaacaacaattggggattccggcccaaaagactcaacttcaagctgttcaacatccaggtcaaggaagtcacgacgaacgaaggcaccaagaccatcgccaataatctcaccagcaccgtgcaggtctttacggactcggagtaccagttaccgtacgtgctaggatccgctcaccagggatgtctgcctccgttcccggcggacgtcttcatggttcctcagtacggctatttaactttaaacaatggaagccaagccctgggacgttcctccttctactgtctggagtatttcccatcgcagatgctgagaaccggcaacaactttcagttcagctacaccttcgaggacgtgcctttccacagcagctacgcgcacagccagagcctggacaggctgatgaatcccctcatcgaccagtacctgtactacctggtcagaacgcaaacgactggaactggagggacgcagactctggcattcagccaagcgggtcctagctcaatggccaaccaggctagaaattgggtgcccggaccttgctaccggcagcagcgcgtctccacgacaaccaaccagaacaacaacagcaactttgcctggacgggagctgccaagtttaagctgaacggccgagactctctaatgaatccgggcgtggcaatggcttcccacaaggatgacgacgaccgcttcttcccttcgagcggggtcctgatttttggcaagcaaggagccgggaacgatggagtggattacagccaagtgctgattacagatgaggaagaaatcaaggctaccaaccccgtggccacagaagaatatggagcagtggccatcaacaaccaggccgccaatacgcaggcgcagaccggactcgtgcacaaccagggggtgattcccggcatggtgtggcagaatagagacgtgtacctgcagggtcccatctgggccaaaattcctcacacggacggcaactttcacccgtctcccctgatgggcggctttggactgaagcacccgcctcctcaaattctcatcaagaacacaccggttccagcggacccgccgcttaccttcaaccaggccaagctgaactctttcatcacgcagtacagcaccggacaggtcagcgtggaaatcgagtgggagctgcagaaagaaaacagcaaacgctggaatccagagattcaatacacttccaactactacaaatctacaaatgtggactttgctgtcaacacggagggggtttatagcgagcctcgccccattggcacccgttacctcacccgcaacctgtaa

SEQ ID NO: 961 - DNA, 2592 bp, synthetic construct
  misc_feature 1..2592: note = source = /note="Description of Artificial Sequence: Synthetic polynucleotide"
  source 1..2592: mol_type = other DNA
ctggctgccgatggttatcttccagattggctcgaggacaacctctctgagggcattcgcgagtggtgggacttgaaacctggagccccgaagcccaaagccaaccagcaaaagcaggacgacggccggggtctggtgcttcctggctacaagtacctcggacccttcaacggactcgacaagggggagcccgtcaacgcggcggacgcagcggccctcgagcacgacaaggcctacgaccagcagctcaaagcgggtgacaatccgtacctgcggtataaccacgccgacgccgagtttcaggagcgtctgcaagaagatacgtcttttgggggcaacctcgggcgagcagtcttccaggccaagaagcgggttctcgaacctctcggtctggttgaggaaggcgctaagatggaagtgcagctccaagccagtggtggcggactggtgcaggcaggaggcagcttgaggctcagctgtgccgccagcggcttcaagatcacccactacaccatgggctggttccggcaggcccctggcaaggagagggagttcgtgagcaggattacctggggtggtgacaacaccttctacagcaacagcgtgaagggcaggttcaccatcagcagggacaacgccaagaacaccgtgtacctgcagatgaacagcctgaagcccgaggacaccgccgactactactgtgcagccggcagtaccagcaccgctacccccctgagggtggactactggggcaaaggcactcaggtgacagtgtcttcaggagggggtggcagcgctcctggaaagaaacgtccggtagagcagtcgccacaagagccagactcctcctcgggcatcggcaagacaggccagcagcccgctaaaaagagactcaattttggtcagactggcgactcagagtcagtccccgatccacaacctctcggagaacctccagcagccccctcaggtctgggacctaatacaatggcttcaggcggtggcgctccaatggcagacaataacgaaggcgccgacggagtgggtaattcctcgggaaattggcattgcgattccacatggctgggggacagagtcatcaccaccagcacccgaacctgggccctgcccacctacaacaaccacctctacaagcaaatctccaacggcacctcgggaggaagcaccaacgacaacacctattttggctacagcaccccctgggggtattttgacttcaacagattccactgtcacttttcaccacgtgactggcaacgactcatcaacaacaattggggattccggcccaaaagactcaacttcaagctgttcaacatccaggtcaaggaagtcacgacgaacgaaggcaccaagaccatcgccaataatctcaccagcaccgtgcaggtctttacggactcggagtaccagttaccgtacgtgctaggatccgctcaccagggatgtctgcctccgttcccggcggacgtcttcatggttcctcagtacggctatttaactttaaacaatggaagccaagccctgggacgttcctccttctactgtctggagtatttcccatcgcagatgctgagaaccggcaacaactttcagttcagctacaccttcgaggacgtgcctttccacagcagctacgcgcacagccagagcctggacaggctgatgaatcccctcatcgaccagtacctgtactacctggtcagaacgcaaacgactggaactggagggacgcagactctggcattcagccaagcgggtcctagctcaatggccaaccaggctagaaattgggtgcccggaccttgctaccggcagcagcgcgtctccacgacaaccaaccagaacaacaacagcaactttgcctggacgggagctgccaagtttaagctgaacggccgagactctctaatgaatccgggcgtggcaatggcttcccacaaggatgacgacgaccgcttcttcccttcgagcggggtcctgatttttggcaagcaaggagccgggaacgatggagtggattacagccaagtgctgattacagatgaggaagaaatcaaggctaccaaccccgtggccacagaagaatatggagcagtggccatcaacaaccaggccgccaatacgcaggcgcagaccggactcgtgcacaaccagggggtgattcccggcatggtgtggcagaatagagacgtgtacctgcagggtcccatctgggccaaaattcctcacacggacggcaactttcacccgtctcccctgatgggcggctttggactgaagcacccgcctcctcaaattctcatcaagaacacaccggttccagcggacccgccgcttaccttcaaccaggccaagctgaactctttcatcacgcagtacagcaccggacaggtcagcgtggaaatcgagtgggagctgcagaaagaaaacagcaaacgctggaatccagagattcaatacacttccaactactacaaatctacaaatgtggactttgctgtcaacacggagggggtttatagcgagcctcgccccattggcacccgttacctcacccgcaacctgtaa

SEQ ID NO: 962 - DNA, 2601 bp, synthetic construct
  misc_feature 1..2601: note = source = /note="Description of Artificial Sequence: Synthetic polynucleotide"
  source 1..2601: mol_type = other DNA
ctggctgccgatggttatcttccagattggctcgaggacaacctctctgagggcattcgcgagtggtgggacttgaaacctggagccccgaagcccaaagccaaccagcaaaagcaggacgacggccggggtctggtgcttcctggctacaagtacctcggacccttcaacggactcgacaagggggagcccgtcaacgcggcggacgcagcggccctcgagcacgacaaggcctacgaccagcagctcaaagcgggtgacaatccgtacctgcggtataaccacgccgacgccgagtttcaggagcgtctgcaagaagatacgtcttttgggggcaacctcgggcgagcagtcttccaggccaagaagcgggttctcgaacctctcggtctggttgaggaaggcgctaagatggaggtgcagctgcaggcttctggaggaggactggtgcaggctggagggagtctgaggctgtcttgcagtgcctcagtgaggactttctccatctacgccatgggctggtttaggcaggctcccgggaaggagcgcgaattcgtggccggaatcaaccggtctggcgacgtgaccaagtacgctgatttcgtgaaaggccggtttagcatttccagagacaacgccaagaatatggtgtatctgcagatgaactccctgaaacctgaagacacagctctgtactattgtgccgctacttgggcctacgataccgtgggggctctgacatcaggatataatttttggggccaggggacccaggtgacagtgagctccggaggaggaggaagcgctcctggaaagaaacgtccggtagagcagtcgccacaagagccagactcctcctcgggcatcggcaagacaggccagcagcccgctaaaaagagactcaattttggtcagactggcgactcagagtcagtccccgatccacaacctctcggagaacctccagcagccccctcaggtctgggacctaatacaatggcttcaggcggtggcgctccaatggcagacaataacgaaggcgccgacggagtgggtaattcctcgggaaattggcattgcgattccacatggctgggggacagagtcatcaccaccagcacccgaacctgggccctgcccacctacaacaaccacctctacaagcaaatctccaacggcacctcgggaggaagcaccaacgacaacacctattttggctacagcaccccctgggggtattttgacttcaacagattccactgtcacttttcaccacgtgactggcaacgactcatcaacaacaattggggattccggcccaaaagactcaacttcaagctgttcaacatccaggtcaaggaagtcacgacgaacgaaggcaccaagaccatcgccaataatctcaccagcaccgtgcaggtctttacggactcggagtaccagttaccgtacgtgctaggatccgctcaccagggatgtctgcctccgttcccggcggacgtcttcatggttcctcagtacggctatttaactttaaacaatggaagccaagccctgggacgttcctccttctactgtctggagtatttcccatcgcagatgctgagaaccggcaacaactttcagttcagctacaccttcgaggacgtgcctttccacagcagctacgcgcacagccagagcctggacaggctgatgaatcccctcatcgaccagtacctgtactacctggtcagaacgcaaacgactggaactggagggacgcagactctggcattcagccaagcgggtcctagctcaatggccaaccaggctagaaattgggtgcccggaccttgctaccggcagcagcgcgtctccacgacaaccaaccagaacaacaacagcaactttgcctggacgggagctgccaagtttaagctgaacggccgagactctctaatgaatccgggcgtggcaatggcttcccacaaggatgacgacgaccgcttcttcccttcgagcggggtcctgatttttggcaagcaaggagccgggaacgatggagtggattacagccaagtgctgattacagatgaggaagaaatcaaggctaccaaccccgtggccacagaagaatatggagcagtggccatcaacaaccaggccgccaatacgcaggcgcagaccggactcgtgcacaaccagggggtgattcccggcatggtgtggcagaatagagacgtgtacctgcagggtcccatctgggccaaaattcctcacacggacggcaactttcacccgtctcccctgatgggcggctttggactgaagcacccgcctcctcaaattctcatcaagaacacaccggttccagcggacccgccgcttaccttcaaccaggccaagctgaactctttcatcacgcagtacagcaccggacaggtcagcgtggaaatcgagtgggagctgcagaaagaaaacagcaaacgctggaatccagagattcaatacacttccaactactacaaatctacaaatgtggactttgctgtcaacacggagggggtttatagcgagcctcgccccattggcacccgttacctcacccgcaacctgtaa

SEQ ID NO: 963 - DNA, 2367 bp, synthetic construct
  misc_feature 1..2367: note = source = /note="Description of Artificial Sequence: Synthetic polynucleotide"
  source 1..2367: mol_type = other DNA
ctggctgccgatggttatcttccagattggctcgaggacaacctctctgagggcattcgcgagtggtgggacttgaaacctggagccccgaagcccaaagccaaccagcaaaagcaggacgacggccggggtctggtgcttcctggctacaagtacctcggacccttcaacggactcgacaagggggagcccgtcaacgcggcggacgcagcggccctcgagcacgacaaggcctacgaccagcagctcaaagcgggtgacaatccgtacctgcggtataaccacgccgacgccgagtttcaggagcgtctgcaagaagatacgtcttttgggggcaacctcgggcgagcagtcttccaggccaagaagcgggttctcgaacctctcggtctggttgaggaaggcgctaagatgccaagcagtgtaatcgatgcgctgcagtacaagctggagggcaccacgaggctgaccaggaagaggggtctgaagctggccacggccctcagccttagcaataagttcgtagagggcagccccagcggcggcggcggcagcggcggcggcggcagcgctcctggaaagaaacgtccggtagagcagtcgccacaagagccagactcctcctcgggcatcggcaagacaggccagcagcccgctaaaaagagactcaattttggtcagactggcgactcagagtcagtccccgatccacaacctctcggagaacctccagcagccccctcaggtctgggacctaatacaatggcttcaggcggtggcgctccaatggcagacaataacgaaggcgccgacggagtgggtaattcctcgggaaattggcattgcgattccacatggctgggggacagagtcatcaccaccagcacccgaacctgggccctgcccacctacaacaaccacctctacaagcaaatctccaacggcacctcgggaggaagcaccaacgacaacacctattttggctacagcaccccctgggggtattttgacttcaacagattccactgtcacttttcaccacgtgactggcaacgactcatcaacaacaattggggattccggcccaaaagactcaacttcaagctgttcaacatccaggtcaaggaagtcacgacgaacgaaggcaccaagaccatcgccaataatctcaccagcaccgtgcaggtctttacggactcggagtaccagttaccgtacgtgctaggatccgctcaccagggatgtctgcctccgttcccggcggacgtcttcatggttcctcagtacggctatttaactttaaacaatggaagccaagccctgggacgttcctccttctactgtctggagtatttcccatcgcagatgctgagaaccggcaacaactttcagttcagctacaccttcgaggacgtgcctttccacagcagctacgcgcacagccagagcctggacaggctgatgaatcccctcatcgaccagtacctgtactacctggtcagaacgcaaacgactggaactggagggacgcagactctggcattcagccaagcgggtcctagctcaatggccaaccaggctagaaattgggtgcccggaccttgctaccggcagcagcgcgtctccacgacaaccaaccagaacaacaacagcaactttgcctggacgggagctgccaagtttaagctgaacggccgagactctctaatgaatccgggcgtggcaatggcttcccacaaggatgacgacgaccgcttcttcccttcgagcggggtcctgatttttggcaagcaaggagccgggaacgatggagtggattacagccaagtgctgattacagatgaggaagaaatcaaggctaccaaccccgtggccacagaagaatatggagcagtggccatcaacaaccaggccgccaatacgcaggcgcagaccggactcgtgcacaaccagggggtgattcccggcatggtgtggcagaatagagacgtgtacctgcagggtcccatctgggccaaaattcctcacacggacggcaactttcacccgtctcccctgatgggcggctttggactgaagcacccgcctcctcaaattctcatcaagaacacaccggttccagcggacccgccgcttaccttcaaccaggccaagctgaactctttcatcacgcagtacagcaccggacaggtcagcgtggaaatcgagtgggagctgcagaaagaaaacagcaaacgctggaatccagagattcaatacacttccaactactacaaatctacaaatgtggactttgctgtcaacacggagggggtttatagcgagcctcgccccattggcacccgttacctcacccgcaacctgtaa

SEQ ID NO: 964 - DNA, 2328 bp, synthetic construct
  misc_feature 1..2328: note = source = /note="Description of Artificial Sequence: Synthetic polynucleotide"
  source 1..2328: mol_type = other DNA
ctggctgccgatggttatcttccagattggctcgaggacaacctctctgagggcattcgcgagtggtgggacttgaaacctggagccccgaagcccaaagccaaccagcaaaagcaggacgacggccggggtctggtgcttcctggctacaagtacctcggacccttcaacggactcgacaagggggagcccgtcaacgcggcggacgcagcggccctcgagcacgacaaggcctacgaccagcagctcaaagcgggtgacaatccgtacctgcggtataaccacgccgacgccgagtttcaggagcgtctgcaagaagatacgtcttttgggggcaacctcgggcgagcagtcttccaggccaagaagcgggttctcgaacctctcggtctggttgaggaaggcgctaagatgtataccatctggatgcccgagaaccccaggcccggtaccccctgcgacatcttcaccaacagcaggggcaagcgagccagcaacggcggcggcggcggcagcggcggcggcggcagcgctcctggaaagaaacgtccggtagagcagtcgccacaagagccagactcctcctcgggcatcggcaagacaggccagcagcccgctaaaaagagactcaattttggtcagactggcgactcagagtcagtccccgatccacaacctctcggagaacctccagcagccccctcaggtctgggacctaatacaatggcttcaggcggtggcgctccaatggcagacaataacgaaggcgccgacggagtgggtaattcctcgggaaattggcattgcgattccacatggctgggggacagagtcatcaccaccagcacccgaacctgggccctgcccacctacaacaaccacctctacaagcaaatctccaacggcacctcgggaggaagcaccaacgacaacacctattttggctacagcaccccctgggggtattttgacttcaacagattccactgtcacttttcaccacgtgactggcaacgactcatcaacaacaattggggattccggcccaaaagactcaacttcaagctgttcaacatccaggtcaaggaagtcacgacgaacgaaggcaccaagaccatcgccaataatctcaccagcaccgtgcaggtctttacggactcggagtaccagttaccgtacgtgctaggatccgctcaccagggatgtctgcctccgttcccggcggacgtcttcatggttcctcagtacggctatttaactttaaacaatggaagccaagccctgggacgttcctccttctactgtctggagtatttcccatcgcagatgctgagaaccggcaacaactttcagttcagctacaccttcgaggacgtgcctttccacagcagctacgcgcacagccagagcctggacaggctgatgaatcccctcatcgaccagtacctgtactacctggtcagaacgcaaacgactggaactggagggacgcagactctggcattcagccaagcgggtcctagctcaatggccaaccaggctagaaattgggtgcccggaccttgctaccggcagcagcgcgtctccacgacaaccaaccagaacaacaacagcaactttgcctggacgggagctgccaagtttaagctgaacggccgagactctctaatgaatccgggcgtggcaatggcttcccacaaggatgacgacgaccgcttcttcccttcgagcggggtcctgatttttggcaagcaaggagccgggaacgatggagtggattacagccaagtgctgattacagatgaggaagaaatcaaggctaccaaccccgtggccacagaagaatatggagcagtggccatcaacaaccaggccgccaatacgcaggcgcagaccggactcgtgcacaaccagggggtgattcccggcatggtgtggcagaatagagacgtgtacctgcagggtcccatctgggccaaaattcctcacacggacggcaactttcacccgtctcccctgatgggcggctttggactgaagcacccgcctcctcaaattctcatcaagaacacaccggttccagcggacccgccgcttaccttcaaccaggccaagctgaactctttcatcacgcagtacagcaccggacaggtcagcgtggaaatcgagtgggagctgcagaaagaaaacagcaaacgctggaatccagagattcaatacacttccaactactacaaatctacaaatgtggactttgctgtcaacacggagggggtttatagcgagcctcgccccattggcacccgttacctcacccgcaacctgtaa

SEQ ID NO: 965 - DNA, 2298 bp, synthetic construct
  misc_feature 1..2298: note = source = /note="Description of Artificial Sequence: Synthetic polynucleotide"
  source 1..2298: mol_type = other DNA
ctggctgccgatggttatcttccagattggctcgaggacaacctctctgagggcattcgcgagtggtgggacttgaaacctggagccccgaagcccaaagccaaccagcaaaagcaggacgacggccggggtctggtgcttcctggctacaagtacctcggacccttcaacggactcgacaagggggagcccgtcaacgcggcggacgcagcggccctcgagcacgacaaggcctacgaccagcagctcaaagcgggtgacaatccgtacctgcggtataaccacgccgacgccgagtttcaggagcgtctgcaagaagatacgtcttttgggggcaacctcgggcgagcagtcttccaggccaagaagcgggttctcgaacctctcggtctggttgaggaaggcgctaagatgaccttcttctacggcggcagcaggggcaagaggaacaacttcaagaccgaggagtacggcggcggcggcagcggcggcggcggcagcgctcctggaaagaaacgtccggtagagcagtcgccacaagagccagactcctcctcgggcatcggcaagacaggccagcagcccgctaaaaagagactcaattttggtcagactggcgactcagagtcagtccccgatccacaacctctcggagaacctccagcagccccctcaggtctgggacctaatacaatggcttcaggcggtggcgctccaatggcagacaataacgaaggcgccgacggagtgggtaattcctcgggaaattggcattgcgattccacatggctgggggacagagtcatcaccaccagcacccgaacctgggccctgcccacctacaacaaccacctctacaagcaaatctccaacggcacctcgggaggaagcaccaacgacaacacctattttggctacagcaccccctgggggtattttgacttcaacagattccactgtcacttttcaccacgtgactggcaacgactcatcaacaacaattggggattccggcccaaaagactcaacttcaagctgttcaacatccaggtcaaggaagtcacgacgaacgaaggcaccaagaccatcgccaataatctcaccagcaccgtgcaggtctttacggactcggagtaccagttaccgtacgtgctaggatccgctcaccagggatgtctgcctccgttcccggcggacgtcttcatggttcctcagtacggctatttaactttaaacaatggaagccaagccctgggacgttcctccttctactgtctggagtatttcccatcgcagatgctgagaaccggcaacaactttcagttcagctacaccttcgaggacgtgcctttccacagcagctacgcgcacagccagagcctggacaggctgatgaatcccctcatcgaccagtacctgtactacctggtcagaacgcaaacgactggaactggagggacgcagactctggcattcagccaagcgggtcctagctcaatggccaaccaggctagaaattgggtgcccggaccttgctaccggcagcagcgcgtctccacgacaaccaaccagaacaacaacagcaactttgcctggacgggagctgccaagtttaagctgaacggccgagactctctaatgaatccgggcgtggcaatggcttcccacaaggatgacgacgaccgcttcttcccttcgagcggggtcctgatttttggcaagcaaggagccgggaacgatggagtggattacagccaagtgctgattacagatgaggaagaaatcaaggctaccaaccccgtggccacagaagaatatggagcagtggccatcaacaaccaggccgccaatacgcaggcgcagaccggactcgtgcacaaccagggggtgattcccggcatggtgtggcagaatagagacgtgtacctgcagggtcccatctgggccaaaattcctcacacggacggcaactttcacccgtctcccctgatgggcggctttggactgaagcacccgcctcctcaaattctcatcaagaacacaccggttccagcggacccgccgcttaccttcaaccaggccaagctgaactctttcatcacgcagtacagcaccggacaggtcagcgtggaaatcgagtgggagctgcagaaagaaaacagcaaacgctggaatccagagattcaatacacttccaactactacaaatctacaaatgtggactttgctgtcaacacggagggggtttatagcgagcctcgccccattggcacccgttacctcacccgcaacctgtaa

SEQ ID NO: 966 - DNA, 2211 bp, synthetic construct
  misc_feature 1..2211: note = source = /note="Description of Artificial Sequence: Synthetic polynucleotide"
  source 1..2211: mol_type = other DNA
atggctgccgatggttatcttccagattggctcgaggacaaccttagtgaaggaattcgcgagtggtgggctttgaaacctggagcccctcaacccaaggcaaatcaacaacatcaagacaacgctcgaggtcttgtgcttccgggttacaaataccttggacccggcaacggactcgacaagggggagccggtcaacgcagcagacgcggcggccctcgagcacgacaaggcctacgaccagcagctcaaggccggagacaacccgtacctcaagtacaaccacgccgacgccgagttccaggagcggctcaaagaagatacgtcttttgggggcaacctcgggcgagcagtcttccaggccaaaaagaggcttcttgaacctcttggtctggttgaggaagcggctaaggcggctcctggaaagaagaggcctgtagagcagtctcctcaggaaccggactcctccgcgggtattggcaaatcgggtgcacagcccgctaaaaagagactcaatttcggtcagactggcgacacagagtcagtcccagaccctcaaccaatcggagaacctcccgcagccccctcaggtgtgggatctcttacaatggcttcaggtggtggcgcaccagtggcagacaataacgaaggtgccgatggagtgggtagttcctcgggaaattggcattgcgattcccaatggctgggggacagagtcatcaccaccagcacccgaacctgggccctgcccacctacaacaatcacctctacaagcaaatctccaacagcacatctggaggatcttcaaatgacaacgcctacttcggctacagcaccccctgggggtattttgacttcaacagattccactgccacttctcaccacgtgactggcagcgactcatcaacaacaactggggattccggcctaagcgactcaacttcaagctcttcaacattcaggtcaaagaggttacggacaacaatggagtcaagaccatcgccaataaccttaccagcacggtccaggtcttcacggactcagactatcagctcccgtacgtgctcgggtcggctcacgagggctgcctcccgccgttcccagcggacgttttcatgattcctcagtacgggtatctgacgcttaatgatggaagccaggccgtgggtcgttcgtccttttactgcctggaatatttcccgtcgcaaatgctaagaacgggtaacaacttccagttcaactacgagtttgagaacgtacctttccatagcagctacgctcacagccaaagcctggaccgactaatgaatccactcatcgaccaatacttgtactatctctcaaagactattaacgattctggacagaatcaacaaacgctaaaattcagtgtggccggacccagcaacatggctgtccagggaagaaactacatacctggacccagctaccgacaacaacgtgtctcaaccactgtgactcaaaacaacaacagcgaatttgcttggcctggagcttcttcttgggctctcaatggacgtaatagcttgatgaatcctggacctgctatggccagccacaaagaaggagaggaccgtttctttcctttgtctggatctttaatttttggcaaacaaggaactggaagagacaacgtggatgcggacgaagtcatgataaccaacgaagaagaaattaaaactactaacccggtagcaacggagtcctatggacaagtggccataaaccaccagagtgcccaagcacaggcgcagaccggctgggttcaaaaccaaggaatacttccgggtatggtttggcaggacagagatgtgtacctgcaaggacccatttgggccaaaattcctcacacggacggcaactttcacccttctccgctgatgggagggtttggaatgaagcacccgcctcctcagatcctcatcaaaaacacacctgtacctgcggatcctccaacggccttcaacaaggacaagctgaactctttcatcacccagtattctactggccaagtcagcgtggagatcgagtgggagctgcagaaggaaaacagcaagcgctggaacccggagatccagtacacttccaactattacaagtctaataatgttgaatttgctgttaatactgaaggtgtatatagtgaaccccgccccattggcaccagatacctgactcgtaatctgtaa

SEQ ID NO: 967 - DNA, 2277 bp, synthetic construct
  misc_feature 1..2277: note = source = /note="Description of Artificial Sequence: Synthetic polynucleotide"
  source 1..2277: mol_type = other DNA
ctggctgccgatggttatcttccagattggctcgaggacaaccttagtgaaggaattcgcgagtggtgggctttgaaacctggagcccctcaacccaaggcaaatcaacaacatcaagacaacgctcgaggtcttgtgcttccgggttacaaataccttggacccggcaacggactcgacaagggggagccggtcaacgcagcagacgcggcggccctcgagcacgacaaggcctacgaccagcagctcaaggccggagacaacccgtacctcaagtacaaccacgccgacgccgagttccaggagcggctcaaagaagatacgtcttttgggggcaacctcgggcgagcagtcttccaggccaaaaagaggcttcttgaacctcttggtctggttgaggaagcggctaagatgaacaaccagaagatcgtgaacctgaaggagaaggtggcccagctggaggccggcggcggcggcagcgctcctggaaagaagaggcctgtagagcagtctcctcaggaaccggactcctccgcgggtattggcaaatcgggtgcacagcccgctaaaaagagactcaatttcggtcagactggcgacacagagtcagtcccagaccctcaaccaatcggagaacctcccgcagccccctcaggtgtgggatctcttacaatggcttcaggtggtggcgcaccagtggcagacaataacgaaggtgccgatggagtgggtagttcctcgggaaattggcattgcgattcccaatggctgggggacagagtcatcaccaccagcacccgaacctgggccctgcccacctacaacaatcacctctacaagcaaatctccaacagcacatctggaggatcttcaaatgacaacgcctacttcggctacagcaccccctgggggtattttgacttcaacagattccactgccacttctcaccacgtgactggcagcgactcatcaacaacaactggggattccggcctaagcgactcaacttcaagctcttcaacattcaggtcaaagaggttacggacaacaatggagtcaagaccatcgccaataaccttaccagcacggtccaggtcttcacggactcagactatcagctcccgtacgtgctcgggtcggctcacgagggctgcctcccgccgttcccagcggacgttttcatgattcctcagtacgggtatctgacgcttaatgatggaagccaggccgtgggtcgttcgtccttttactgcctggaatatttcccgtcgcaaatgctaagaacgggtaacaacttccagttcaactacgagtttgagaacgtacctttccatagcagctacgctcacagccaaagcctggaccgactaatgaatccactcatcgaccaatacttgtactatctctcaaagactattaacgattctggacagaatcaacaaacgctaaaattcagtgtggccggacccagcaacatggctgtccagggaagaaactacatacctggacccagctaccgacaacaacgtgtctcaaccactgtgactcaaaacaacaacagcgaatttgcttggcctggagcttcttcttgggctctcaatggacgtaatagcttgatgaatcctggacctgctatggccagccacaaagaaggagaggaccgtttctttcctttgtctggatctttaatttttggcaaacaaggaactggaagagacaacgtggatgcggacgaagtcatgataaccaacgaagaagaaattaaaactactaacccggtagcaacggagtcctatggacaagtggccataaaccaccagagtgcccaagcacaggcgcagaccggctgggttcaaaaccaaggaatacttccgggtatggtttggcaggacagagatgtgtacctgcaaggacccatttgggccaaaattcctcacacggacggcaactttcacccttctccgctgatgggagggtttggaatgaagcacccgcctcctcagatcctcatcaaaaacacacctgtacctgcggatcctccaacggccttcaacaaggacaagctgaactctttcatcacccagtattctactggccaagtcagcgtggagatcgagtgggagctgcagaaggaaaacagcaagcgctggaacccggagatccagtacacttccaactattacaagtctaataatgttgaatttgctgttaatactgaaggtgtatatagtgaaccccgccccattggcaccagatacctgactcgtaatctgtaa

SEQ ID NO: 968 - DNA, 2313 bp, synthetic construct
  misc_feature 1..2313: note = source = /note="Description of Artificial Sequence: Synthetic polynucleotide"
  source 1..2313: mol_type = other DNA
ctggctgccgatggttatcttccagattggctcgaggacaaccttagtgaaggaattcgcgagtggtgggctttgaaacctggagcccctcaacccaaggcaaatcaacaacatcaagacaacgctcgaggtcttgtgcttccgggttacaaataccttggacccggcaacggactcgacaagggggagccggtcaacgcagcagacgcggcggccctcgagcacgacaaggcctacgaccagcagctcaaggccggagacaacccgtacctcaagtacaaccacgccgacgccgagttccaggagcggctcaaagaagatacgtcttttgggggcaacctcgggcgagcagtcttccaggccaaaaagaggcttcttgaacctcttggtctggttgaggaagcggctaagatgtataccatctggatgcccgagaaccccaggcccggtaccccctgcgacatcttcaccaacagcaggggcaagcgagccagcaacggcggcggcggcggcagcgctcctggaaagaagaggcctgtagagcagtctcctcaggaaccggactcctccgcgggtattggcaaatcgggtgcacagcccgctaaaaagagactcaatttcggtcagactggcgacacagagtcagtcccagaccctcaaccaatcggagaacctcccgcagccccctcaggtgtgggatctcttacaatggcttcaggtggtggcgcaccagtggcagacaataacgaaggtgccgatggagtgggtagttcctcgggaaattggcattgcgattcccaatggctgggggacagagtcatcaccaccagcacccgaacctgggccctgcccacctacaacaatcacctctacaagcaaatctccaacagcacatctggaggatcttcaaatgacaacgcctacttcggctacagcaccccctgggggtattttgacttcaacagattccactgccacttctcaccacgtgactggcagcgactcatcaacaacaactggggattccggcctaagcgactcaacttcaagctcttcaacattcaggtcaaagaggttacggacaacaatggagtcaagaccatcgccaataaccttaccagcacggtccaggtcttcacggactcagactatcagctcccgtacgtgctcgggtcggctcacgagggctgcctcccgccgttcccagcggacgttttcatgattcctcagtacgggtatctgacgcttaatgatggaagccaggccgtgggtcgttcgtccttttactgcctggaatatttcccgtcgcaaatgctaagaacgggtaacaacttccagttcaactacgagtttgagaacgtacctttccatagcagctacgctcacagccaaagcctggaccgactaatgaatccactcatcgaccaatacttgtactatctctcaaagactattaacgattctggacagaatcaacaaacgctaaaattcagtgtggccggacccagcaacatggctgtccagggaagaaactacatacctggacccagctaccgacaacaacgtgtctcaaccactgtgactcaaaacaacaacagcgaatttgcttggcctggagcttcttcttgggctctcaatggacgtaatagcttgatgaatcctggacctgctatggccagccacaaagaaggagaggaccgtttctttcctttgtctggatctttaatttttggcaaacaaggaactggaagagacaacgtggatgcggacgaagtcatgataaccaacgaagaagaaattaaaactactaacccggtagcaacggagtcctatggacaagtggccataaaccaccagagtgcccaagcacaggcgcagaccggctgggttcaaaaccaaggaatacttccgggtatggtttggcaggacagagatgtgtacctgcaaggacccatttgggccaaaattcctcacacggacggcaactttcacccttctccgctgatgggagggtttggaatgaagcacccgcctcctcagatcctcatcaaaaacacacctgtacctgcggatcctccaacggccttcaacaaggacaagctgaactctttcatcacccagtattctactggccaagtcagcgtggagatcgagtgggagctgcagaaggaaaacagcaagcgctggaacccggagatccagtacacttccaactattacaagtctaataatgttgaatttgctgttaatactgaaggtgtatatagtgaaccccgccccattggcaccagatacctgactcgtaatctgtaa

SEQ ID NO: 969 - DNA, 2283 bp, synthetic construct
  misc_feature 1..2283: note = source = /note="Description of Artificial Sequence: Synthetic polynucleotide"
  source 1..2283: mol_type = other DNA
ctggctgccgatggttatcttccagattggctcgaggacaaccttagtgaaggaattcgcgagtggtgggctttgaaacctggagcccctcaacccaaggcaaatcaacaacatcaagacaacgctcgaggtcttgtgcttccgggttacaaataccttggacccggcaacggactcgacaagggggagccggtcaacgcagcagacgcggcggccctcgagcacgacaaggcctacgaccagcagctcaaggccggagacaacccgtacctcaagtacaaccacgccgacgccgagttccaggagcggctcaaagaagatacgtcttttgggggcaacctcgggcgagcagtcttccaggccaaaaagaggcttcttgaacctcttggtctggttgaggaagcggctaagatgaccttcttctacggcggcagcaggggcaagaggaacaacttcaagaccgaggagtacggcggcggcggcagcgctcctggaaagaagaggcctgtagagcagtctcctcaggaaccggactcctccgcgggtattggcaaatcgggtgcacagcccgctaaaaagagactcaatttcggtcagactggcgacacagagtcagtcccagaccctcaaccaatcggagaacctcccgcagccccctcaggtgtgggatctcttacaatggcttcaggtggtggcgcaccagtggcagacaataacgaaggtgccgatggagtgggtagttcctcgggaaattggcattgcgattcccaatggctgggggacagagtcatcaccaccagcacccgaacctgggccctgcccacctacaacaatcacctctacaagcaaatctccaacagcacatctggaggatcttcaaatgacaacgcctacttcggctacagcaccccctgggggtattttgacttcaacagattccactgccacttctcaccacgtgactggcagcgactcatcaacaacaactggggattccggcctaagcgactcaacttcaagctcttcaacattcaggtcaaagaggttacggacaacaatggagtcaagaccatcgccaataaccttaccagcacggtccaggtcttcacggactcagactatcagctcccgtacgtgctcgggtcggctcacgagggctgcctcccgccgttcccagcggacgttttcatgattcctcagtacgggtatctgacgcttaatgatggaagccaggccgtgggtcgttcgtccttttactgcctggaatatttcccgtcgcaaatgctaagaacgggtaacaacttccagttcaactacgagtttgagaacgtacctttccatagcagctacgctcacagccaaagcctggaccgactaatgaatccactcatcgaccaatacttgtactatctctcaaagactattaacgattctggacagaatcaacaaacgctaaaattcagtgtggccggacccagcaacatggctgtccagggaagaaactacatacctggacccagctaccgacaacaacgtgtctcaaccactgtgactcaaaacaacaacagcgaatttgcttggcctggagcttcttcttgggctctcaatggacgtaatagcttgatgaatcctggacctgctatggccagccacaaagaaggagaggaccgtttctttcctttgtctggatctttaatttttggcaaacaaggaactggaagagacaacgtggatgcggacgaagtcatgataaccaacgaagaagaaattaaaactactaacccggtagcaacggagtcctatggacaagtggccataaaccaccagagtgcccaagcacaggcgcagaccggctgggttcaaaaccaaggaatacttccgggtatggtttggcaggacagagatgtgtacctgcaaggacccatttgggccaaaattcctcacacggacggcaactttcacccttctccgctgatgggagggtttggaatgaagcacccgcctcctcagatcctcatcaaaaacacacctgtacctgcggatcctccaacggccttcaacaaggacaagctgaactctttcatcacccagtattctactggccaagtcagcgtggagatcgagtgggagctgcagaaggaaaacagcaagcgctggaacccggagatccagtacacttccaactattacaagtctaataatgttgaatttgctgttaatactgaaggtgtatatagtgaaccccgccccattggcaccagatacctgactcgtaatctgtaa

SEQ ID NO: 970 - DNA, 2283 bp, synthetic construct
  misc_feature 1..2283: note = source = /note="Description of Artificial Sequence: Synthetic polynucleotide"
  source 1..2283: mol_type = other DNA
ctggctgccgatggttatcttccagattggctcgaggacaaccttagtgaaggaattcgcgagtggtgggctttgaaacctggagcccctcaacccaaggcaaatcaacaacatcaagacaacgctcgaggtcttgtgcttccgggttacaaataccttggacccggcaacggactcgacaagggggagccggtcaacgcagcagacgcggcggccctcgagcacgacaaggcctacgaccagcagctcaaggccggagacaacccgtacctcaagtacaaccacgccgacgccgagttccaggagcggctcaaagaagatacgtcttttgggggcaacctcgggcgagcagtcttccaggccaaaaagaggcttcttgaacctcttggtctggttgaggaagcggctaagatggcagctgcggccgccgcggctgcagcggctgcagccgccgcagctgcggctgcagcgggcggcggcggcagcgctcctggaaagaagaggcctgtagagcagtctcctcaggaaccggactcctccgcgggtattggcaaatcgggtgcacagcccgctaaaaagagactcaatttcggtcagactggcgacacagagtcagtcccagaccctcaaccaatcggagaacctcccgcagccccctcaggtgtgggatctcttacaatggcttcaggtggtggcgcaccagtggcagacaataacgaaggtgccgatggagtgggtagttcctcgggaaattggcattgcgattcccaatggctgggggacagagtcatcaccaccagcacccgaacctgggccctgcccacctacaacaatcacctctacaagcaaatctccaacagcacatctggaggatcttcaaatgacaacgcctacttcggctacagcaccccctgggggtattttgacttcaacagattccactgccacttctcaccacgtgactggcagcgactcatcaacaacaactggggattccggcctaagcgactcaacttcaagctcttcaacattcaggtcaaagaggttacggacaacaatggagtcaagaccatcgccaataaccttaccagcacggtccaggtcttcacggactcagactatcagctcccgtacgtgctcgggtcggctcacgagggctgcctcccgccgttcccagcggacgttttcatgattcctcagtacgggtatctgacgcttaatgatggaagccaggccgtgggtcgttcgtccttttactgcctggaatatttcccgtcgcaaatgctaagaacgggtaacaacttccagttcaactacgagtttgagaacgtacctttccatagcagctacgctcacagccaaagcctggaccgactaatgaatccactcatcgaccaatacttgtactatctctcaaagactattaacgattctggacagaatcaacaaacgctaaaattcagtgtggccggacccagcaacatggctgtccagggaagaaactacatacctggacccagctaccgacaacaacgtgtctcaaccactgtgactcaaaacaacaacagcgaatttgcttggcctggagcttcttcttgggctctcaatggacgtaatagcttgatgaatcctggacctgctatggccagccacaaagaaggagaggaccgtttctttcctttgtctggatctttaatttttggcaaacaaggaactggaagagacaacgtggatgcggacgaagtcatgataaccaacgaagaagaaattaaaactactaacccggtagcaacggagtcctatggacaagtggccataaaccaccagagtgcccaagcacaggcgcagaccggctgggttcaaaaccaaggaatacttccgggtatggtttggcaggacagagatgtgtacctgcaaggacccatttgggccaaaattcctcacacggacggcaactttcacccttctccgctgatgggagggtttggaatgaagcacccgcctcctcagatcctcatcaaaaacacacctgtacctgcggatcctccaacggccttcaacaaggacaagctgaactctttcatcacccagtattctactggccaagtcagcgtggagatcgagtgggagctgcagaaggaaaacagcaagcgctggaacccggagatccagtacacttccaactattacaagtctaataatgttgaatttgctgttaatactgaaggtgtatatagtgaaccccgccccattggcaccagatacctgactcgtaatctgtaa

SEQ ID NO: 971 - protein, 726 aa, synthetic construct
  REGION 1..726: note = source = /note="Description of Artificial Sequence: Synthetic polypeptide"
MEVQLQASGGGLVQAGGSLRLSCAASGFKITHYTMGWFRQAPGKEREFVSRITWGGDNTFYSNSVKGRFTISRDNAKNTVYLQMNSLKPEDTADYYCAAGSTSTATPLRVDYWGKGTQVTVSSGGGGSAPGKKRPVEQSPQEPDSSSGIGKTGQQPAKKRLNFGQTGDSESVPDPQPLGEPPAAPSGLGPNTMASGGGAPMADNNEGADGVGNSSGNWHCDSTWLGDRVITTSTRTWALPTYNNHLYKQISNGTSGGSTNDNTYFGYSTPWGYFDFNRFHCHFSPRDWQRLINNNWGFRPKRLNFKLFNIQVKEVTTNEGTKTIANNLTSTVQVFTDSEYQLPYVLGSAHQGCLPPFPADVFMVPQYGYLTLNNGSQALGRSSFYCLEYFPSQMLRTGNNFQFSYTFEDVPFHSSYAHSQSLDRLMNPLIDQYLYYLVRTQTTGTGGTQTLAFSQAGPSSMANQARNWVPGPCYRQQRVSTTTNQNNNSNFAWTGAAKFKLNGRDSLMNPGVAMASHKDDDDRFFPSSGVLIFGKQGAGNDGVDYSQVLITDEEEIKATNPVATEEYGAVAINNQAANTQAQTGLVHNQGVIPGMVWQNRDVYLQGPIWAKIPHTDGNFHPSPLMGGFGLKHPPPQILIKNTPVPADPPLTFNQAKLNSFITQYSTGQVSVEIEWELQKENSKRWNPEIQYTSNYYKSTNVDFAVNTEGVYSEPRPIGTRYLTRNL

SEQ ID NO: 972 - protein, 729 aa, synthetic construct
  REGION 1..729: note = source = /note="Description of Artificial Sequence: Synthetic polypeptide"
MEVQLQASGGGLVQAGGSLRLSCSASVRTFSIYAMGWFRQAPGKEREFVAGINRSGDVTKYADFVKGRFSISRDNAKNMVYLQMNSLKPEDTALYYCAATWAYDTVGALTSGYNFWGQGTQVTVSSGGGGSAPGKKRPVEQSPQEPDSSSGIGKTGQQPAKKRLNFGQTGDSESVPDPQPLGEPPAAPSGLGPNTMASGGGAPMADNNEGADGVGNSSGNWHCDSTWLGDRVITTSTRTWALPTYNNHLYKQISNGTSGGSTNDNTYFGYSTPWGYFDFNRFHCHFSPRDWQRLINNNWGFRPKRLNFKLFNIQVKEVTTNEGTKTIANNLTSTVQVFTDSEYQLPYVLGSAHQGCLPPFPADVFMVPQYGYLTLNNGSQALGRSSFYCLEYFPSQMLRTGNNFQFSYTFEDVPFHSSYAHSQSLDRLMNPLIDQYLYYLVRTQTTGTGGTQTLAFSQAGPSSMANQARNWVPGPCYRQQRVSTTTNQNNNSNFAWTGAAKFKLNGRDSLMNPGVAMASHKDDDDRFFPSSGVLIFGKQGAGNDGVDYSQVLITDEEEIKATNPVATEEYGAVAINNQAANTQAQTGLVHNQGVIPGMVWQNRDVYLQGPIWAKIPHTDGNFHPSPLMGGFGLKHPPPQILIKNTPVPADPPLTFNQAKLNSFITQYSTGQVSVEIEWELQKENSKRWNPEIQYTSNYYKSTNVDFAVNTEGVYSEPRPIGTRYLTRNL

SEQ ID NO: 973 - protein, 651 aa, synthetic construct
  REGION 1..651: note = source = /note="Description of Artificial Sequence: Synthetic polypeptide"
MPSSVIDALQYKLEGTTRLTRKRGLKLATALSLSNKFVEGSPSGGGGSGGGGSAPGKKRPVEQSPQEPDSSSGIGKTGQQPAKKRLNFGQTGDSESVPDPQPLGEPPAAPSGLGPNTMASGGGAPMADNNEGADGVGNSSGNWHCDSTWLGDRVITTSTRTWALPTYNNHLYKQISNGTSGGSTNDNTYFGYSTPWGYFDFNRFHCHFSPRDWQRLINNNWGFRPKRLNFKLFNIQVKEVTTNEGTKTIANNLTSTVQVFTDSEYQLPYVLGSAHQGCLPPFPADVFMVPQYGYLTLNNGSQALGRSSFYCLEYFPSQMLRTGNNFQFSYTFEDVPFHSSYAHSQSLDRLMNPLIDQYLYYLVRTQTTGTGGTQTLAFSQAGPSSMANQARNWVPGPCYRQQRVSTTTNQNNNSNFAWTGAAKFKLNGRDSLMNPGVAMASHKDDDDRFFPSSGVLIFGKQGAGNDGVDYSQVLITDEEEIKATNPVATEEYGAVAINNQAANTQAQTGLVHNQGVIPGMVWQNRDVYLQGPIWAKIPHTDGNFHPSPLMGGFGLKHPPPQILIKNTPVPADPPLTFNQAKLNSFITQYSTGQVSVEIEWELQKENSKRWNPEIQYTSNYYKSTNVDFAVNTEGVYSEPRPIGTRYLTRNL

SEQ ID NO: 974 - protein, 638 aa, synthetic construct
  REGION 1..638: note = source = /note="Description of Artificial Sequence: Synthetic polypeptide"
MYTIWMPENPRPGTPCDIFTNSRGKRASNGGGGGSGGGGSAPGKKRPVEQSPQEPDSSSGIGKTGQQPAKKRLNFGQTGDSESVPDPQPLGEPPAAPSGLGPNTMASGGGAPMADNNEGADGVGNSSGNWHCDSTWLGDRVITTSTRTWALPTYNNHLYKQISNGTSGGSTNDNTYFGYSTPWGYFDFNRFHCHFSPRDWQRLINNNWGFRPKRLNFKLFNIQVKEVTTNEGTKTIANNLTSTVQVFTDSEYQLPYVLGSAHQGCLPPFPADVFMVPQYGYLTLNNGSQALGRSSFYCLEYFPSQMLRTGNNFQFSYTFEDVPFHSSYAHSQSLDRLMNPLIDQYLYYLVRTQTTGTGGTQTLAFSQAGPSSMANQARNWVPGPCYRQQRVSTTTNQNNNSNFAWTGAAKFKLNGRDSLMNPGVAMASHKDDDDRFFPSSGVLIFGKQGAGNDGVDYSQVLITDEEEIKATNPVATEEYGAVAINNQAANTQAQTGLVHNQGVIPGMVWQNRDVYLQGPIWAKIPHTDGNFHPSPLMGGFGLKHPPPQILIKNTPVPADPPLTFNQAKLNSFITQYSTGQVSVEIEWELQKENSKRWNPEIQYTSNYYKSTNVDFAVNTEGVYSEPRPIGTRYLTRNL

SEQ ID NO: 975 - protein, 628 aa, synthetic construct
  REGION 1..628: note = source = /note="Description of Artificial Sequence: Synthetic polypeptide"
MTFFYGGSRGKRNNFKTEEYGGGGSGGGGSAPGKKRPVEQSPQEPDSSSGIGKTGQQPAKKRLNFGQTGDSESVPDPQPLGEPPAAPSGLGPNTMASGGGAPMADNNEGADGVGNSSGNWHCDSTWLGDRVITTSTRTWALPTYNNHLYKQISNGTSGGSTNDNTYFGYSTPWGYFDFNRFHCHFSPRDWQRLINNNWGFRPKRLNFKLFNIQVKEVTTNEGTKTIANNLTSTVQVFTDSEYQLPYVLGSAHQGCLPPFPADVFMVPQYGYLTLNNGSQALGRSSFYCLEYFPSQMLRTGNNFQFSYTFEDVPFHSSYAHSQSLDRLMNPLIDQYLYYLVRTQTTGTGGTQTLAFSQAGPSSMANQARNWVPGPCYRQQRVSTTTNQNNNSNFAWTGAAKFKLNGRDSLMNPGVAMASHKDDDDRFFPSSGVLIFGKQGAGNDGVDYSQVLITDEEEIKATNPVATEEYGAVAINNQAANTQAQTGLVHNQGVIPGMVWQNRDVYLQGPIWAKIPHTDGNFHPSPLMGGFGLKHPPPQILIKNTPVPADPPLTFNQAKLNSFITQYSTGQVSVEIEWELQKENSKRWNPEIQYTSNYYKSTNVDFAVNTEGVYSEPRPIGTRYLTRNL

SEQ ID NO: 976 - protein, 621 aa, synthetic construct
  REGION 1..621: note = source = /note="Description of Artificial Sequence: Synthetic polypeptide"
MNNQKIVNLKEKVAQLEAGGGGSAPGKKRPVEQSPQEPDSSAGIGKSGAQPAKKRLNFGQTGDTESVPDPQPIGEPPAAPSGVGSLTMASGGGAPVADNNEGADGVGSSSGNWHCDSQWLGDRVITTSTRTWALPTYNNHLYKQISNSTSGGSSNDNAYFGYSTPWGYFDFNRFHCHFSPRDWQRLINNNWGFRPKRLNFKLFNIQVKEVTDNNGVKTIANNLTSTVQVFTDSDYQLPYVLGSAHEGCLPPFPADVFMIPQYGYLTLNDGSQAVGRSSFYCLEYFPSQMLRTGNNFQFNYEFENVPFHSSYAHSQSLDRLMNPLIDQYLYYLSKTINDSGQNQQTLKFSVAGPSNMAVQGRNYIPGPSYRQQRVSTTVTQNNNSEFAWPGASSWALNGRNSLMNPGPAMASHKEGEDRFFPLSGSLIFGKQGTGRDNVDADEVMITNEEEIKTTNPVATESYGQVAINHQSAQAQAQTGWVQNQGILPGMVWQDRDVYLQGPIWAKIPHTDGNFHPSPLMGGFGMKHPPPQILIKNTPVPADPPTAFNKDKLNSFITQYSTGQVSVEIEWELQKENSKRWNPEIQYTSNYYKSNNVEFAVNTEGVYSEPRPIGTRYLTRNL

SEQ ID NO: 977 - protein, 633 aa, synthetic construct
  REGION 1..633: note = source = /note="Description of Artificial Sequence: Synthetic polypeptide"
MYTIWMPENPRPGTPCDIFTNSRGKRASNGGGGGSAPGKKRPVEQSPQEPDSSAGIGKSGAQPAKKRLNFGQTGDTESVPDPQPIGEPPAAPSGVGSLTMASGGGAPVADNNEGADGVGSSSGNWHCDSQWLGDRVITTSTRTWALPTYNNHLYKQISNSTSGGSSNDNAYFGYSTPWGYFDFNRFHCHFSPRDWQRLINNNWGFRPKRLNFKLFNIQVKEVTDNNGVKTIANNLTSTVQVFTDSDYQLPYVLGSAHEGCLPPFPADVFMIPQYGYLTLNDGSQAVGRSSFYCLEYFPSQMLRTGNNFQFNYEFENVPFHSSYAHSQSLDRLMNPLIDQYLYYLSKTINDSGQNQQTLKFSVAGPSNMAVQGRNYIPGPSYRQQRVSTTVTQNNNSEFAWPGASSWALNGRNSLMNPGPAMASHKEGEDRFFPLSGSLIFGKQGTGRDNVDADEVMITNEEEIKTTNPVATESYGQVAINHQSAQAQAQTGWVQNQGILPGMVWQDRDVYLQGPIWAKIPHTDGNFHPSPLMGGFGMKHPPPQILIKNTPVPADPPTAFNKDKLNSFITQYSTGQVSVEIEWELQKENSKRWNPEIQYTSNYYKSNNVEFAVNTEGVYSEPRPIGTRYLTRNL

SEQ ID NO: 978 - protein, 623 aa, synthetic construct
  REGION 1..623: note = source = /note="Description of Artificial Sequence: Synthetic polypeptide"
MTFFYGGSRGKRNNFKTEEYGGGGSAPGKKRPVEQSPQEPDSSAGIGKSGAQPAKKRLNFGQTGDTESVPDPQPIGEPPAAPSGVGSLTMASGGGAPVADNNEGADGVGSSSGNWHCDSQWLGDRVITTSTRTWALPTYNNHLYKQISNSTSGGSSNDNAYFGYSTPWGYFDFNRFHCHFSPRDWQRLINNNWGFRPKRLNFKLFNIQVKEVTDNNGVKTIANNLTSTVQVFTDSDYQLPYVLGSAHEGCLPPFPADVFMIPQYGYLTLNDGSQAVGRSSFYCLEYFPSQMLRTGNNFQFNYEFENVPFHSSYAHSQSLDRLMNPLIDQYLYYLSKTINDSGQNQQTLKFSVAGPSNMAVQGRNYIPGPSYRQQRVSTTVTQNNNSEFAWPGASSWALNGRNSLMNPGPAMASHKEGEDRFFPLSGSLIFGKQGTGRDNVDADEVMITNEEEIKTTNPVATESYGQVAINHQSAQAQAQTGWVQNQGILPGMVWQDRDVYLQGPIWAKIPHTDGNFHPSPLMGGFGMKHPPPQILIKNTPVPADPPTAFNKDKLNSFITQYSTGQVSVEIEWELQKENSKRWNPEIQYTSNYYKSNNVEFAVNTEGVYSEPRPIGTRYLTRNL

SEQ ID NO: 979 - protein, 623 aa, synthetic construct
  REGION 1..623: note = source = /note="Description of Artificial Sequence: Synthetic polypeptide"
MAAAAAAAAAAAAAAAAAAAGGGGSAPGKKRPVEQSPQEPDSSAGIGKSGAQPAKKRLNFGQTGDTESVPDPQPIGEPPAAPSGVGSLTMASGGGAPVADNNEGADGVGSSSGNWHCDSQWLGDRVITTSTRTWALPTYNNHLYKQISNSTSGGSSNDNAYFGYSTPWGYFDFNRFHCHFSPRDWQRLINNNWGFRPKRLNFKLFNIQVKEVTDNNGVKTIANNLTSTVQVFTDSDYQLPYVLGSAHEGCLPPFPADVFMIPQYGYLTLNDGSQAVGRSSFYCLEYFPSQMLRTGNNFQFNYEFENVPFHSSYAHSQSLDRLMNPLIDQYLYYLSKTINDSGQNQQTLKFSVAGPSNMAVQGRNYIPGPSYRQQRVSTTVTQNNNSEFAWPGASSWALNGRNSLMNPGPAMASHKEGEDRFFPLSGSLIFGKQGTGRDNVDADEVMITNEEEIKTTNPVATESYGQVAINHQSAQAQAQTGWVQNQGILPGMVWQDRDVYLQGPIWAKIPHTDGNFHPSPLMGGFGMKHPPPQILIKNTPVPADPPTAFNKDKLNSFITQYSTGQVSVEIEWELQKENSKRWNPEIQYTSNYYKSNNVEFAVNTEGVYSEPRPIGTRYLTRNL

SEQ ID NO: 980 - DNA, 2214 bp, synthetic construct
  misc_feature 1..2214: note = source = /note="Description of Artificial Sequence: Synthetic polynucleotide"
  source 1..2214: mol_type = other DNA
atggctgccgatggttatcttccagattggctcgaggacaacctctctgagggcattcgcgagtggtgggacttgaaacctggagccccgaagcccaaagccaaccagcaaaagcaggacgacggccggggtctggtgcttcctggctacaagtacctcggacccttcaacggactcgacaagggggagcccgtcaacgcggcggacgcagcggccctcgagcacgacaaggcctacgaccagcagctcaaagcgggtgacaatccgtacctgcggtataaccacgccgacgtcgagtttcaggagcgtctgcaagaagatacgtcttttgggggcaacctcgggcgagcagtcttccaggccaagaagagggttctcgaaccttttggtctggttgaggaaggcgctaagacggctcctggaaagaaacgtccggtagagcagtcgccacaagagccagactcctcctcgggcatcggcaagaaaggccaacagcccgccagaaaaagactcaattttggccagactggcgactcagagtcagttccagaccctcaacctctcggagaacctccagcagcgccctctggtgtgggacctaatacaatggctgcaggcggtggcgcaccaatggcagacaataacgagggcgccgacggagtgggtaattcctcgggaaattggcattgcgattccacatggatgggggacagagtcatcaccaccagcacccgaacctgggccctgcccacctacaacaaccacctctacaagcaaatctccaacggcacctcgggaggaagcaccaacgacaacacctattttggctacagcaccccctgggggtattttgatttcaacagattccactgccacttctcaccacgtgactggcagcgactcatcaacaacaactggggattccggccaaaaagactcagcttcaagctcttcaacatccaggtcaaggaggtcacgcagaatgaaggcaccaagaccatcgccaataaccttaccagcacgattcaggtatttacggactcggaataccagctgccatacgtcctcggctccgcgcaccagggctgcctgcctccgttcccggcggacgtcttcatgattccccagtacggctaccttacactgaacaatggaagtcaagccgtaggccgttcctccttctactgcctggaatattttccttctcaaatgctgagaacgggcaacaactttgagttcagctaccagtttgaggacgtgccttttcacagcagctacgcgcacagccaaagcctggaccggctgatgaaccccctcatcgaccagtacctgtactacctgtctcggactcagtccacgggaggtaccgcaagaactcagcagttgctattttctcaggccgggcctaatacaatggccaatcaggcaaagaactggctgccaggaccctgttaccgccaacaacgcgtctcaacgacaaccgggcaaaacaacaatagcaactctgcctggactgctgggaccaaataccatctgaatggaagaaattcattggctaatcctggcatcgctatggcaacacacaaagacgacgaggagcgtttttttcccagtaacgggatcctgatttttggcaaacaaaatgctgccagagacaatgcggattacagcgatgtcatgctcaccagcgaggaagaaatcaaaaccactaaccctgtggctacagaggaatacggtatcgtggcagataacttgcagcagcaaaacacggctcctcaaattggaactgtcaacagccagggggccttacccggtatggtctggcagaaccgggacgtgtacctgcagggtcccatctgggccaagattcctcacacggacggcaacttccacccatctccgctgatgggcggctttggcctgaaacatcctccgcctcagatcctgatcaagaacacgcctgtacctgcggatcctccgaccaccttcaaccagtcaaagctgaactctttcatcacgcaatacagcaccggacaggtcagcgtggaaattgaatgggagctacagaaggaaaacagcaagcgctggaaccccgagatccagtacacctccaactactacaaatctacaagtgtggactttgctgttaatacagaaggcgtgtactctgaaccccgccccattggcacccgttacctcacccgtaatctgtaa

SEQ ID NO: 981 - DNA, 2214 bp, synthetic construct
  misc_feature 1..2214: note = source = /note="Description of Artificial Sequence: Synthetic polynucleotide"
  source 1..2214: mol_type = other DNA
atggctgccgatggttatcttccagattggctcgaggacaacctctctgagggcattcgcgagtggtgggcgctgaaacctggagccccgaagcccaaagccaaccagcaaaagcaggacgacggccggggtctggtgcttcctggctacaagtacctcggacccttcaacggactcgacaagggggagcccgtcaacgcggcggacgcagcggccctcgagcacgacaaggcctacgaccagcagctcaaagcgggtgacaatccgtacctgcggtataaccacgccgacgccgagtttcaggagcgtctgcaagaagatacgtcttttgggggcaacctcgggcgagcagtcttccaggccaagaagcgggttctcgaacctctcggtctggttgaggacggcgctaagacggctcctggaaagaagagaccagtagagcagtcaccccaagaaccagactcctcctcgggcatcggcaagaaaggccaacagcccgccagaaaaagactcaattttggccagactggcgactcagagtcagttccagaccctcaacctctcggagaacctccagcaacccccgctgctgtgggacctactacaatggcttcaggcggtggcgcaccaatggcagacaataacgaaggcgccgacggagtgggtagttcctcgggaaattggcattgcgattccacatggctgggcgacagagtcatcaccaccagcacccgaacctgggccctgcccacctacaacaaccacctctacaagcaaatctccaacgggacatcgggaggagccaccaacgacaacacctacttcggctacagcaccccctgggggtattttgactttaacagattccactgccacttttcaccacgtgactggcagcgactcatcaacaacaactggggattccggcccaagagactcagcttcaagctcttcaacatccaggtcaaggaggtcacgcagaatgaaggcaccaagaccatcgccaataacctcaccagcaccatccaggtgtttacggactcggagtaccagctgccgtacgttctcggctctgcccaccagggctgcctgcctccgttcccggcggacgtgttcatgattccccagtacggctacctaacactcaacaacggtagtcaggccgtgggacgctcctccttctactgcctggaatactttccttcgcagatgctgagaaccggcaacaacttccagtttacttacaccttcgaggacgtgcctttccacagcagctacgcccacagccagagcttggaccggctgatgaatcctctgattgaccagtacctgtactacttgtctcggactcaaacaacaggaggcacggcaaatacgcagactctgggcttcagccaaggtgggcctaatacaatggccaatcaggcaaagaactggctgccaggaccctgttaccgccaacaacgcgtctcaacgacaaccgggcaaaacaacaatagcaactttgcctggactgctgggaccaaataccatctgaatggaagaaattcattggctaatcctggcatcgctatggcaacacacaaggacgacgaggagcgtttttttcccagtaacgggatcctgatttttggcaaacaaaatgctgccagagacaatgcggattacagcgatgtcatgctcaccagcgaggaagaaatcaaaaccactaaccctgtggctacagaggaatacggtatcgtggcagataacttgcagcagcaaaacacggctcctcaaattggaactgtcaacagccagggggccttacccggtatggtctggcagaaccgggacgtgtacctgcagggtcccatctgggccaagattcctcacacggacggcaacttccacccgtctccgctgatgggcggctttggcctgaaacatcctccgcctcagatcctgatcaagaacacgcctgtacctgcggatcctccgaccaccttcaaccagtcaaagctgaactctttcatcacgcaatacagcaccggacaggtcagcgtggaaatcgagtgggagctgcagaaagaaaacagcaagcgctggaaccccgagatccagtacacctccaactactacaaatctacaaatgtggactttgctgtcaacacggagggggtttatagcgagcctcgccccattggcacccgttacctcacccgcaacctgtaa

SEQ ID NO: 982 - DNA, 2211 bp, synthetic construct
  misc_difference 715: note = modified_base - a, c, t, or g
  misc_feature 1..2211: note = source = /note="Description of Artificial Sequence: Synthetic polynucleotide"
  source 1..2211: mol_type = other DNA
atggctgccgatggttatcttccagattggctcgaggacaacctctctgagggcattcgcgagtggtgggcgctgaaacctggagccccgaagcccaaagccaaccagcaaaagcaggacgacggccggggtctggtgcttcctggctacaagtacctcggacccttcaacggactcgacaagggggagcccgtcaacgcggcggacgcagcggccctcgagcacgacaaggcctacgaccagcagctcaaagcgggtgacaatccgtacctgcggtataaccacgccgacgccgagtttcaggagcgtctgcaagaagatacgtcttttgggggcaacctcgggcgagcagtcttccaggccaagaagcgggttctcgaacctctcggtctggttgaggaaggcgctaagacggctcctggaaagaaacgtccggtagagcagtcgccacaagagccagactcctcctcgggcatcggcaagacaggccagcagcccgctaaaaagaggctcaattttggtcagactggcgactcagagtcagtccccgacccacaacctctcggagaacctccagcaacccccgctgctgtgggacctactacaatggcttcaggcggtggcgcaccaatggcagacaataacgaaggcgccgacggagtgggtaatgcctcaggaaattggcattgcgattccacatggctgggcgacagantcatcaccaccagcacccgaacatgggccttgcccacctataacaaccacctctacaagcaaatctccagtgcttcaacgggggccagcaacgacaaccactacttcggctacagcaccccctgggggtattttgatttcaacagattccactgccatttctcaccacgtgactggcagcgactcatcaacaacaattggggattccggcccaagagactcaacttcaagctcttcaacatccaagtcaaggaggtcacgcagaatgaaggcaccaagaccatcgccaataacctcaccagcaccatccaggtgtttacggactcggagtaccagctgccgtacgttctcggctctgcccaccagggctgcctgcctccgttcccggcggacgtgttcatgattccccagtacggctacctaacactcaacaacggtagtcaggccgtgggacgctcctccttctactgcctggaatattttccatctcaaatgctgcgaactggaaacaattttgaattcagctacaccttcgaggacgtgcctttccacagcagctacgcacacagccagagcttggaccgactgatgaatcctctcatcgaccagtacctgtactacttgtctcggactcaaacaacaggaggcacggcaaatacgcagactctgggcttcagccaaggtgggcctaatacaatggccaatcaggcaaagaactggctgccaggaccctgttaccgccaacaacgcgtctcaacgacaaccgggcaaaacaacaatagcaactttgcctggactgctgggaccaaataccatctgaatggaagaaattcattggctaatcctggcatcgctatggcaacacacaaagacgacgaggagcgtttttttcccagtaacgggatcctgatttttggcaaacaaaatgctgccagagacaatgcggattacagcgatgtcatgctcaccagcgaggaagaaatcaaaaccactaaccctgtggctacagaggaatacggtatcgtggcagataacttgcagcagcaaaacacggctcctcaaattggaactgtcaacagccaggggaccttacccggtatggtctggcagaaccgggacgtgtacctgcagggtcccatctgggccaagattcctcacacggacggcaacttccacccgtctccgctgatgggcggctttggcctgaaacatcctccgcctcagatcctgatcaagaacacgcctgtacctgcggatcctccgaccaccttcaaccagtcaaagctgaactctttcatcacgcaatacagcaccggacaggtcagcgtggaaattgaatgggagctacagaaggaaaacagcaagcgctggaaccccgagatccagtacacctccaattactacaaatctacaagtgtggactttgctgttaatacagaaggcgtgtactctgaaccccgccccattggcacgcgtttcctcacccgtaatctgtaa

SEQ ID NO: 983 - DNA, 2214 bp, synthetic construct
  misc_feature 1..2214: note = source = /note="Description of Artificial Sequence: Synthetic polynucleotide"
  source 1..2214: mol_type = other DNA
atggctgccgatggttatcttccagattggctcgaggacaacctctctgagggcattcgcgagtggtgggcgctgaaacctggagccccgaagcccaaagccaaccagcaaaagcaggacgacggccggggtctggtgcttcctggctacaagtacctcggacccttcaacggactcgacaagggggagcccgtcaacgcggcggacgcagcggccctcgagcacgacaaggcctacgaccagcagctcaaagcgggtgacaatccgtacctgcggtataaccacgccgacgccgagtttcaggagcgtctgcaagaagatacgtcttttgggggcaacctcgggcgagcagtcttccaggccaagaagcgggttctcgaacctctcggtctggttgaggaaggcgctaagacggctcctggaaagaaacgtccggtagagcagtcgccacaagagccagactcctcctcgggcatcggcaagacaggccagcagcccgctaaaaagaggctcaattttggccagactggcgactcagagtcagttccagaccctcaacctctcggagaacctccagcagcgccctctggtgtgggacctaatacaatggctgcaggcggtggcgcaccaatggcagacaataacgaaggcgccgacggagtgggtagttcctcgggaaattggcattgcgattccacatggctgggcgacagagtcatcaccaccagcacccgaacctgggccctgcccacctacaacaaccacctctacaagcaaatctccaacgggacatcgggaggagccaccaacgacaacacctacttcggctacagcaccccctgggggtattttgactttaacagattccactgccacttttcaccacgtgactggcagcgactcatcaacaacaactggggattccggcccaagagactcagcttcaagctcttcaacatccaggtcaaggaggtcacgcagaatgaaggcaccaagaccatcgccaataacctcaccagcaccatccaggtgtttacggactcggagtaccagctgccgtacgtactaggatccgctcaccagggatgtctgcctccgttcccggcggacgtgttcatgattccccagtacggctacctaacactcaacaacggtagtcaggccgtgggacgctcctccttctactgcctggaatattttccatctcagatgctgagaacgggcaataactttaccttcagctacaccttcgaggacgtgcctttccacagcagctatgcccacagccagagcttggaccggctgatgaatcctctgattgaccagtacctgtactacttgtctcggactcaaacaacaggaggcacggcaaatacgcagactctgggcttcagccaaggtgggcctaatacaatggccaatcaggcaaagaactggctgccaggaccctgttaccgccaacaacgcgtctcaacgacaaccgggcaaaacaacaatagcaactttgcctggactgctgggaccaaataccatctgaatggaagaaattcattggctaatcctggcatcgctatggcaacacacaaagacgacgaggagcgtttttttcccagtaacgggatcctgatttttggcaaacaaaatgctgccagagacaatgcggattacagcgatgtcatgctcaccagcgaggaagaaatcaaaaccactaaccctgtggctacagaggaatacggtatcgtggcagataacttgcagcagcaaaacacggctcctcaaattggaactgtcaacagccagggggccttacccggtatggtctggcagaaccgggacgtgtacctgcagggtcccatctgggccaagattcctcacacggacggcaacttccacccgtctccgctaatgggaggatttggactgaagcacccacctcctcagatcctgatcaagaacacgccggtacctgcggatcctccgaccaccttcaaccagtcaaagctgtactctttcatcacgcaatacagcaccggacaggtcagcgtggaaattgaatgggagctgcagaaggaaaacagcaagcgctggaaccccgagatccaatacacctccaactactacaaatctacaagtgtggactttgctgttaatacagaaggcgtgtactctgaaccccgccccattggcacccgttacctcacccgtaatctgtaa

SEQ ID NO: 984 - protein, 737 aa, synthetic construct
  REGION 1..737: note = source = /note="Description of Artificial Sequence: Synthetic polypeptide"
MAADGYLPDWLEDNLSEGIREWWDLKPGAPKPKANQQKQDDGRGLVLPGYKYLGPFNGLDKGEPVNAADAAALEHDKAYDQQLKAGDNPYLRYNHADVEFQERLQEDTSFGGNLGRAVFQAKKRVLEPFGLVEEGAKTAPGKKRPVEQSPQEPDSSSGIGKKGQQPARKRLNFGQTGDSESVPDPQPLGEPPAAPSGVGPNTMAAGGGAPMADNNEGADGVGNSSGNWHCDSTWMGDRVITTSTRTWALPTYNNHLYKQISNGTSGGSTNDNTYFGYSTPWGYFDFNRFHCHFSPRDWQRLINNNWGFRPKRLSFKLFNIQVKEVTQNEGTKTIANNLTSTIQVFTDSEYQLPYVLGSAHQGCLPPFPADVFMIPQYGYLTLNNGSQAVGRSSFYCLEYFPSQMLRTGNNFEFSYQFEDVPFHSSYAHSQSLDRLMNPLIDQYLYYLSRTQSTGGTARTQQLLFSQAGPNTMANQAKNWLPGPCYRQQRVSTTTGQNNNSNSAWTAGTKYHLNGRNSLANPGIAMATHKDDEERFFPSNGILIFGKQNAARDNADYSDVMLTSEEEIKTTNPVATEEYGIVADNLQQQNTAPQIGTVNSQGALPGMVWQNRDVYLQGPIWAKIPHTDGNFHPSPLMGGFGLKHPPPQILIKNTPVPADPPTTFNQSKLNSFITQYSTGQVSVEIEWELQKENSKRWNPEIQYTSNYYKSTSVDFAVNTEGVYSEPRPIGTRYLTRNL

SEQ ID NO: 985 - protein, 737 aa, synthetic construct
  REGION 1..737: note = source = /note="Description of Artificial Sequence: Synthetic polypeptide"
MAADGYLPDWLEDNLSEGIREWWALKPGAPKPKANQQKQDDGRGLVLPGYKYLGPFNGLDKGEPVNAADAAALEHDKAYDQQLKAGDNPYLRYNHADAEFQERLQEDTSFGGNLGRAVFQAKKRVLEPLGLVEDGAKTAPGKKRPVEQSPQEPDSSSGIGKKGQQPARKRLNFGQTGDSESVPDPQPLGEPPATPAAVGPTTMASGGGAPMADNNEGADGVGSSSGNWHCDSTWLGDRVITTSTRTWALPTYNNHLYKQISNGTSGGATNDNTYFGYSTPWGYFDFNRFHCHFSPRDWQRLINNNWGFRPKRLSFKLFNIQVKEVTQNEGTKTIANNLTSTIQVFTDSEYQLPYVLGSAHQGCLPPFPADVFMIPQYGYLTLNNGSQAVGRSSFYCLEYFPSQMLRTGNNFQFTYTFEDVPFHSSYAHSQSLDRLMNPLIDQYLYYLSRTQTTGGTANTQTLGFSQGGPNTMANQAKNWLPGPCYRQQRVSTTTGQNNNSNFAWTAGTKYHLNGRNSLANPGIAMATHKDDEERFFPSNGILIFGKQNAARDNADYSDVMLTSEEEIKTTNPVATEEYGIVADNLQQQNTAPQIGTVNSQGALPGMVWQNRDVYLQGPIWAKIPHTDGNFHPSPLMGGFGLKHPPPQILIKNTPVPADPPTTFNQSKLNSFITQYSTGQVSVEIEWELQKENSKRWNPEIQYTSNYYKSTNVDFAVNTEGVYSEPRPIGTRYLTRNL

SEQ ID NO: 986 - protein, 736 aa, synthetic construct
  VARIANT 239: note = MOD_RES - Any naturally occurring amino acid
  REGION 1..736: note = source = /note="Description of Artificial Sequence: Synthetic polypeptide"
MAADGYLPDWLEDNLSEGIREWWALKPGAPKPKANQQKQDDGRGLVLPGYKYLGPFNGLDKGEPVNAADAAALEHDKAYDQQLKAGDNPYLRYNHADAEFQERLQEDTSFGGNLGRAVFQAKKRVLEPLGLVEEGAKTAPGKKRPVEQSPQEPDSSSGIGKTGQQPAKKRLNFGQTGDSESVPDPQPLGEPPATPAAVGPTTMASGGGAPMADNNEGADGVGNASGNWHCDSTWLGDRXITTSTRTWALPTYNNHLYKQISSASTGASNDNHYFGYSTPWGYFDFNRFHCHFSPRDWQRLINNNWGFRPKRLNFKLFNIQVKEVTQNEGTKTIANNLTSTIQVFTDSEYQLPYVLGSAHQGCLPPFPADVFMIPQYGYLTLNNGSQAVGRSSFYCLEYFPSQMLRTGNNFEFSYTFEDVPFHSSYAHSQSLDRLMNPLIDQYLYYLSRTQTTGGTANTQTLGFSQGGPNTMANQAKNWLPGPCYRQQRVSTTTGQNNNSNFAWTAGTKYHLNGRNSLANPGIAMATHKDDEERFFPSNGILIFGKQNAARDNADYSDVMLTSEEEIKTTNPVATEEYGIVADNLQQQNTAPQIGTVNSQGTLPGMVWQNRDVYLQGPIWAKIPHTDGNFHPSPLMGGFGLKHPPPQILIKNTPVPADPPTTFNQSKLNSFITQYSTGQVSVEIEWELQKENSKRWNPEIQYTSNYYKSTSVDFAVNTEGVYSEPRPIGTRFLTRNL

SEQ ID NO: 987 - protein, 737 aa, synthetic construct
  REGION 1..737: note = source = /note="Description of Artificial Sequence: Synthetic polypeptide"
MAADGYLPDWLEDNLSEGIREWWALKPGAPKPKANQQKQDDGRGLVLPGYKYLGPFNGLDKGEPVNAADAAALEHDKAYDQQLKAGDNPYLRYNHADAEFQERLQEDTSFGGNLGRAVFQAKKRVLEPLGLVEEGAKTAPGKKRPVEQSPQEPDSSSGIGKTGQQPAKKRLNFGQTGDSESVPDPQPLGEPPAAPSGVGPNTMAAGGGAPMADNNEGADGVGSSSGNWHCDSTWLGDRVITTSTRTWALPTYNNHLYKQISNGTSGGATNDNTYFGYSTPWGYFDFNRFHCHFSPRDWQRLINNNWGFRPKRLSFKLFNIQVKEVTQNEGTKTIANNLTSTIQVFTDSEYQLPYVLGSAHQGCLPPFPADVFMIPQYGYLTLNNGSQAVGRSSFYCLEYFPSQMLRTGNNFTFSYTFEDVPFHSSYAHSQSLDRLMNPLIDQYLYYLSRTQTTGGTANTQTLGFSQGGPNTMANQAKNWLPGPCYRQQRVSTTTGQNNNSNFAWTAGTKYHLNGRNSLANPGIAMATHKDDEERFFPSNGILIFGKQNAARDNADYSDVMLTSEEEIKTTNPVATEEYGIVADNLQQQNTAPQIGTVNSQGALPGMVWQNRDVYLQGPIWAKIPHTDGNFHPSPLMGGFGLKHPPPQILIKNTPVPADPPTTFNQSKLYSFITQYSTGQVSVEIEWELQKENSKRWNPEIQYTSNYYKSTSVDFAVNTEGVYSEPRPIGTRYLTRNL

SEQ ID NO: 988 - DNA, 2208 bp, synthetic construct
  misc_feature 1..2208: note = source = /note="Description of Artificial Sequence: Synthetic polynucleotide"
  source 1..2208: mol_type = other DNA
atggctgccgatggttatcttccagattggctcgaggacaacctctctgagggcattcgcgagtggtgggacttgaaacctggagccccgaaacccaaagccaaccagcaaaagcaggacgacggccggggtctggtgcttcctggctacaagtacctcggacccttcaacggactcgacaagggggagcccgtcaacgcggcggatgcagcggccctcgagcacgacaaagcctacgaccggcagctcgacagcggagacaacccgtacctcaagtacaaccacgccgacgcggagtttcaggagcgccttaaagaagatacgtcttttgggggcaacctcggacgagcagtcttccaggccaagaagagggttctcgaaccttttggtctggttgaggaaggtgctaagacggctcctggaaagaaacgtccggtagagcagtcgccacaagagccagactcctcctcgggcattggcaagacaggccagcagcccgctaaaaagagactcaattttggtcagactggcgactcagagtcagtccccgacccacaacctctcggagaacctccagcaacccccgctgctgtgggacctactacaatggcttcaggtggtggcgcaccagtggcagacaataacgaaggcgccgacggagtgggtagttcctcgggaaattggcattgcgattccacatggctgggcgacagagtcatcaccaccagcacccgaacatgggccttgcccacctataacaaccacctctacaagcaaatctccagtgcttcgacgggggccagcaacgacaaccactacttcggctacagcaccccctgggggtattttgatttcaacaggttccactgccatttctcaccacgtgactggcagcgactcatcaacaacaattggggattccggcccaaaagactcaacttcaagctgttcaacatccaggtcaaggaagtcacgacgaacgaaggcaccaagaccatcgccaataatctcaccagcaccgtgcaggtctttacggactcggagtaccagttaccgtacgtgctaggatccgctcaccagggatgtctgcctccgttcccggcggacgtcttcatggttcctcagtacggctatttaactttaaacaatggaagccaagccctgggacgttcctccttctactgtctggagtatttcccatcgcagatgctgagaacgggcaacaactttacctttagctacaccttcgaggacgtgcctttccacagcagctacgcgcacagccagagcctggacaggctgatgaatcccctcatcgaccagtacctgtactacctggtcagaacgcaaacgactggaactggagggacgcagactctggcattcagccaagcgggtcctagctcaatggccaaccaggctagaaattgggtgcccggaccttgctaccggcagcagcgcgtctccacgacaaccaaccagaacaacaacagcaactttgcctggacgggagctgccaagtttaagctgaacggccgagactctctaatgaatccgggcgtggcaatggcttcccacaaggatgacgacgaccgcttcttcccttcgagcggggtcctgatttttggcaagcaaggagccgggaacgatggagtggattacagccaagtgctgattacagatgaggaagaaatcaaggctaccaaccccgtggccacagaagaatatggagcagtggccatcaacaaccaggccgccaatacgcaggcgcagaccggactcgtgcacaaccagggggtgattcccggcatggtgtggcagaatagagacgtgtacctgcagggtcccatctgggccaaaattcctcacacggacggcaactttcacccgtctcccctgatgggcggctttggactgaagcacccgcctcctcaaattctcatcaagaacacaccggttccagcggacccgccgcttaccttcaaccaggccaagctgaactctttcatcacgcagtacagcaccggacaggtcagcgtggaaatcgagtgggagctgcagaaagaaaacagcaaacgctggaatccagagattcaatacacttccaactactacaaatctacaaatgtggactttgctgtcaacacggagggggtttatagcgagcctcgccccattggcacccgttacctcacccgcaacctgtaa

SEQ ID NO: 989 - DNA, 2211 bp, synthetic construct
  misc_difference 337: note = modified_base - a, c, t, or g
  misc_feature 1..2211: note = source = /note="Description of Artificial Sequence: Synthetic polynucleotide"
  source 1..2211: mol_type = other DNA
atggctgccgatggttatcttccagattggctcgaggacactctctctgaaggaataagacagtggtggaagctcaaacctggcccaccaccaccaaagcccgcagagcggcataaggacgacagcaggggtcttgtgcttcctggctacaagtacctcggacccttcaacggactcgacaagggggagcccgtcaacgcggcggacgcagcgaccctcgagcacgacaaggcctacgaccagcagctcaaagcgggtgacaatccgtacctgcggtataaccacgccgacgccgagtttcaggagcgtctgcaagaagatacgtcttttgggggcnacctcgggcgagcagtcttccaggccaagaagcgggttctcgaacctctcggtctggttgaggaagctgctaagacggctcctggaaagaagagaccagtagagccatcaccccagcgttctccagactcctctacgggcatcggcaagaaaggccaacagcccgccagaaaaagactcaattttggtcagactggcgactcagagtcagttccagaccctcaacctctcggagaacctccagcagcgccctctggtgtgggacctaatacaatggctgcaggcggtggcgcaccaatggcagacaataacgaaggcgccgacggagtgggtagttcctcgggaaattggcattgcgattccacatggctgggcgacagagtcatcaccaccagcacccgaacctgggccctgcccacctacaacaaccacctctacaagcaaatctccagtgcttcaacgggggccagcaacgacaaccactacttcggctacagcaccccctgggggtattttgatttcaacagattccactgccatttctcaccacgtgactggcagcgactcatcaacaacaattggggattccggcccaagagactcaacttcaagctcttcaacatccaagtcaaggaggtcacgacgaatgatggcgtcacgaccatcgctaataaccttaccagcacggttcaagtcttctcggactcagactatcagctcccgtacgtgctcgggtcggctcacgagggctgcctcccgccgttcccagcggacgttttcatgattcctcagtacggctatttaactttaaacaatggaagccaagccctgggacgttcctccttctactgtctggagtatttcccatcgcagatgctgagaaccggcaacaactttcagttcagctacaccttcgaggacgtgcctttccacagcagctacgcgcacagccagagcctggacaggctgatgaatcccctcatcgaccagtacctgtactacctggtcagaacgcaaacgactggaactggagggacgcagactctggcattcagccaagcgggtcctagctcaatggccaaccaggctagaaattgggtgcccggaccttgctaccggcagcagcgcgtctccacgacaaccaaccagaacaacaacagcaactttgcctggacgggagctgccaagtttaagctgaacggccgagactctctaatgaatccgggcgtggcaatggcttcccacaaggatgacgacgaccgcttcttcccttcgagcggggtcctgatttttggcaagcaaggagccgggaacgatggagtggattacagccaagtgctgattacagatgaggaagaaatcaaggctaccaaccccgtagccacagaagaatatggagcagtggccatcaacaaccaggccgccaatacgcaggcgcagaccggactcgtgcacaaccagggggtgattcccggaatggtgtggcaagacagagacgtatacctgcagggtcctatttgggccaaaattcctcacacggatggacactttcacccgtctcctctcatgggcggctttggacttaagcacccgcctcctcagatcctcatcaaaaacacgcctgttcctgcgaatcctccggcagagttttcggctacaaagtttgcttcattcatcacccagtattccacaggacaagtgagcgtggagattgaatgggagctgcagaaagaaaacagcaaacgctggaatcccgaagtgcagtatacatctaactatgcaaaatctgccaacgttgatttcactgtggacaacaatggactttatactgagcctcgccccattggcacccgttacctcacccgtcccctgtaa

SEQ ID NO: 990 - DNA, 2214 bp, synthetic construct
  misc_difference 335: note = modified_base - a, c, t, or g
  misc_feature 1..2214: note = source = /note="Description of Artificial Sequence: Synthetic polynucleotide"
  source 1..2214: mol_type = other DNA
atgactgacggttaccttccagattggctagaggacaacctctctgaaggcgttcgagagtggtgggcgctgcaacctggagccccgaagcccaaagccaaccagcaaaagcaggacgacggccggggtctggtgcttcctggctacaagtacctcggacccttcaacggactcgacaagggggagcccgtcaacgcggcggacgcagcggccctcgagcacgacaaggcctacgaccagcagctcaaagcgggtgacaatccgtacctgcggtataaccacgccgacgccgagtttcaggagcgtctgcaagaagatacgtcttttgggggcancctcgggcgagcagtcttccaggccaagaagcgggttctcgaacctctcggtctggttgaggaaggcgctaagacggctcctggaaagaaacgtccggtagagccatcaccccagcgttctccagactcctctacgggcatcggcaagaaaggccaacagcccgccagaaaaagactcaattttggtcagactggcgactcagagtcagttccagaccctcaacctctcggagaacctccagcagcgccctcaggtgtgggatctcttacaatggcttcaggtggtggcgcaccagtggcagacaataacgaaggtgccgatggagtgggtagttcctcgggaaattggcattgcgattcccaatggctgggggacagagtcatcaccaccagcacccgaacctgggccctgcccacctacaacaatcacctctacaagcaaatctccaacagcacatctggaggatcttcaaatgacaacgcctacttcggctacagcaccccctgggggtattttgacttcaacagattccactgccacttctcaccacgtgactggcagcgactcatcaacaacaactggggattccggcccaagagactcagcttcaagctcttcaacatccaggtcaaggaggtcacgcagaatgaaggcaccaagaccatcgccaataacctcaccagcaccatccaggtgtttacggactcggagtaccagctgccgtacgttctcggctctgcccaccagggctgcctgcctccgttcccggcggacgtgttcatgattccccagtacggctacctaacactcaacaacggtagtcaggccgtgggacgctcctccttctactgcctggaatactttccttcgcagatgctgagaaccggcaacaacttccagtttacttacaccttcgaggacgtgcctttccacagcagctacgcccacagccagagcttggaccggctgatgaatcctctgattgaccagtacctgtactacttgtctcggactcaaacaacaggaggcacggcaaatacgcagactctgggcttcagccaaggtgggcctaatacaatggccaatcaggcaaagaactggctgccaggaccctgttaccgccaacaacgcgtctcaacgacaaccgggcaaaacaacaatagcaactttgcctggactgctgggaccaaataccatctgaatggaagaaattcattggctaatcctggcatcgctatggcaacacacaaagacgacgaggagcgtttttttcccagtaacgggatcctgatttttggcaaacaaaatgctgccagagacaatgcggattacagcgatgtcatgctcaccagcgaggaagaaatcaaaaccactaaccctgtggctacagaggaatacggtatcgtggcagataacttgcagcagcaaaacacggctcctcaaattggaactgtcaacagccagggggccttacccggtatggtctggcagaaccgggacgtgtacctgcagggtcccatctgggccaagattcctcacacggacggcaacttccacccgtctccgctgatgggcggctttggcctgaaacatcctccgcctcagatcctgatcaagaacacgcctgtacctgcggatcctccgaccaccttaaaccaggccaagctgaactctttcatcacgcaatacagcaccggacaggtcagcgtggaaattgaatgggagctgcagaaggaaaacagcaagcgctggaacccagagattcagtacacttcaaactactacaaatctacaaatgtggactttgctgtcaatacagagggaacttatagtgaaccccgccccattggcaccagatttctgactcgtaatctgtaa

SEQ ID NO: 991 - DNA, 2211 bp, synthetic construct
  misc_difference 338: note = modified_base - a, c, t, or g
  misc_feature 1..2211: note = source = /note="Description of Artificial Sequence: Synthetic polynucleotide"
  source 1..2211: mol_type = other DNA
atggctgccgatggttatcttccagattggctcgaggacactctctctgaaggaataagacagtggtggaagctcaaacctggcccaccaccaccaaagcccgcagagcggcataaggacgacagcaggggtcttgtgcttcctgggtacaagtacctcggccccttcaacggactcgacaagggggagcccgtcaacgcggcggacgcagcggccctcgagcacgacaaggcctacgaccagcagctcgaagcgggtgacaatccgtacctgcggtataaccacgccgacgccgagtttcaggagcgtctgcaagaagatacgtcttttgggggcancctcgggcgagcagtcttccaggccaagaagcgggttctcgaacctctcggtctggttgaggaaggcgctaagacggctcctggaaagaagagaccagtagagcagtcaccccaagaaccagactcctcctcgggcatcggcaggaaaggccaacagcccgccagaaaaagactcaattttggccagactggcgactcagagtcagttccagaccctcaacctctcggagaacctccagcagcgccctctggtgtgggacctaatacaatggcttcaggcggtggcgctccaatggcagacaataacgaaggcgccgacggagtgggtaatgcctcaggaaattggcattgcgattccacatggctgggcgacagagtcatcaccaccagcacccgcacctgggccttgcccacctacaataaccacctctacaagcaaatctccagtgcttcaacgggggccagcaacgacaaccactacttcggctacagcaccccctgggggtattttgatttcaacagattccactgccacttttcaccacgtgactggcagcgactcatcaacaacaattggggattccggcccaagagactcaacttcaaactcttcaacatccaggtcaaggaggtcacgcagaatgaaggcactaagaccatcgccaataaccttaccagcacgattcaggtatttacggactcggaataccagctgccgtacgtcctcggctccgcgcaccagggctgcctgcctccgttcccggcggacgtcttcatgattccccagtacggctaccttacactgaacaatggaagtcaagccgtaggccgttcctccttctactgcctggaatattttccatctcaaatgctgcgaactggcaacaacttccagtttacctacaccttcgaggacgtgcctttccacagcagctacgcccacagccagagcttggaccggctgatgaatcctctgattgaccagtacctgtactacttgtctcggactcagtccacaggaggaactcaaggtacccagcaattgttattttctcaagctgggcctgcaaacatgtcggctcaggctaagaactggctacctggaccttgctaccggcagcagcgagtctctacgacactgtcgcaaaacaacaacagcaactttgcttggactggtgccaccaaatatcacctgaacggaagagactctttggtaaatcccggtgtcgccatggcaacccacaaggacgacgaggaacgcttcttcccgtcgagtggagtcctgatgtttggaaaacagggtgctggaagagacaatgtggactacagcagcgttatgctaaccagcgaagaagaaattaaaaccactaaccctgtagccacagaacaatacggtgtggtggttgataacttgcagcaaaccaatacggggcctattgtgggaaatgtcaacagccaaggagccttacctggtatggtctggcagaaccgggacgtgtacctgcagggtcccatctgggccaagattcctcacacggacggcaacttccacccgtctccgctgatgggcggctttggcctgaaacatcctccgcctcagatcctcatcaaaaacacacctgtacctgcggatcctccaacggccttcaacaaggacaagctgaactctttcatcacccagtattctactggccaagtcagcgtggagatcgagtgggagctgcagaaggaaaacagcaagcgctggaacccggagatccagtacacttccaactattacaagtctaataatgttgaatttgctgttaatactgaaggtgtatatagtgaaccccgccccattggcaccagatacctgactcgtaatctgtaa

SEQ ID NO: 992 - protein, 735 aa, synthetic construct
  REGION 1..735: note = source = /note="Description of Artificial Sequence: Synthetic polypeptide"
MAADGYLPDWLEDNLSEGIREWWDLKPGAPKPKANQQKQDDGRGLVLPGYKYLGPFNGLDKGEPVNAADAAALEHDKAYDRQLDSGDNPYLKYNHADAEFQERLKEDTSFGGNLGRAVFQAKKRVLEPFGLVEEGAKTAPGKKRPVEQSPQEPDSSSGIGKTGQQPAKKRLNFGQTGDSESVPDPQPLGEPPATPAAVGPTTMASGGGAPVADNNEGADGVGSSSGNWHCDSTWLGDRVITTSTRTWALPTYNNHLYKQISSASTGASNDNHYFGYSTPWGYFDFNRFHCHFSPRDWQRLINNNWGFRPKRLNFKLFNIQVKEVTTNEGTKTIANNLTSTVQVFTDSEYQLPYVLGSAHQGCLPPFPADVFMVPQYGYLTLNNGSQALGRSSFYCLEYFPSQMLRTGNNFTFSYTFEDVPFHSSYAHSQSLDRLMNPLIDQYLYYLVRTQTTGTGGTQTLAFSQAGPSSMANQARNWVPGPCYRQQRVSTTTNQNNNSNFAWTGAAKFKLNGRDSLMNPGVAMASHKDDDDRFFPSSGVLIFGKQGAGNDGVDYSQVLITDEEEIKATNPVATEEYGAVAINNQAANTQAQTGLVHNQGVIPGMVWQNRDVYLQGPIWAKIPHTDGNFHPSPLMGGFGLKHPPPQILIKNTPVPADPPLTFNQAKLNSFITQYSTGQVSVEIEWELQKENSKRWNPEIQYTSNYYKSTNVDFAVNTEGVYSEPRPIGTRYLTRNL

SEQ ID NO: 993 - protein, 736 aa, synthetic construct
  VARIANT 113: note = MOD_RES - Any naturally occurring amino acid
  REGION 1..736: note = source = /note="Description of Artificial Sequence: Synthetic polypeptide"
MAADGYLPDWLEDTLSEGIRQWWKLKPGPPPPKPAERHKDDSRGLVLPGYKYLGPFNGLDKGEPVNAADAATLEHDKAYDQQLKAGDNPYLRYNHADAEFQERLQEDTSFGGXLGRAVFQAKKRVLEPLGLVEEAAKTAPGKKRPVEPSPQRSPDSSTGIGKKGQQPARKRLNFGQTGDSESVPDPQPLGEPPAAPSGVGPNTMAAGGGAPMADNNEGADGVGSSSGNWHCDSTWLGDRVITTSTRTWALPTYNNHLYKQISSASTGASNDNHYFGYSTPWGYFDFNRFHCHFSPRDWQRLINNNWGFRPKRLNFKLFNIQVKEVTTNDGVTTIANNLTSTVQVFSDSDYQLPYVLGSAHEGCLPPFPADVFMIPQYGYLTLNNGSQALGRSSFYCLEYFPSQMLRTGNNFQFSYTFEDVPFHSSYAHSQSLDRLMNPLIDQYLYYLVRTQTTGTGGTQTLAFSQAGPSSMANQARNWVPGPCYRQQRVSTTTNQNNNSNFAWTGAAKFKLNGRDSLMNPGVAMASHKDDDDRFFPSSGVLIFGKQGAGNDGVDYSQVLITDEEEIKATNPVATEEYGAVAINNQAANTQAQTGLVHNQGVIPGMVWQDRDVYLQGPIWAKIPHTDGHFHPSPLMGGFGLKHPPPQILIKNTPVPANPPAEFSATKFASFITQYSTGQVSVEIEWELQKENSKRWNPEVQYTSNYAKSANVDFTVDNNGLYTEPRPIGTRYLTRPL

SEQ ID NO: 994 - protein, 737 aa, synthetic construct
  VARIANT 112: note = MOD_RES - Any naturally occurring amino acid
  REGION 1..737: note = source = /note="Description of Artificial Sequence: Synthetic polypeptide"
MTDGYLPDWLEDNLSEGVREWWALQPGAPKPKANQQKQDDGRGLVLPGYKYLGPFNGLDKGEPVNAADAAALEHDKAYDQQLKAGDNPYLRYNHADAEFQERLQEDTSFGGXLGRAVFQAKKRVLEPLGLVEEGAKTAPGKKRPVEPSPQRSPDSSTGIGKKGQQPARKRLNFGQTGDSESVPDPQPLGEPPAAPSGVGSLTMASGGGAPVADNNEGADGVGSSSGNWHCDSQWLGDRVITTSTRTWALPTYNNHLYKQISNSTSGGSSNDNAYFGYSTPWGYFDFNRFHCHFSPRDWQRLINNNWGFRPKRLSFKLFNIQVKEVTQNEGTKTIANNLTSTIQVFTDSEYQLPYVLGSAHQGCLPPFPADVFMIPQYGYLTLNNGSQAVGRSSFYCLEYFPSQMLRTGNNFQFTYTFEDVPFHSSYAHSQSLDRLMNPLIDQYLYYLSRTQTTGGTANTQTLGFSQGGPNTMANQAKNWLPGPCYRQQRVSTTTGQNNNSNFAWTAGTKYHLNGRNSLANPGIAMATHKDDEERFFPSNGILIFGKQNAARDNADYSDVMLTSEEEIKTTNPVATEEYGIVADNLQQQNTAPQIGTVNSQGALPGMVWQNRDVYLQGPIWAKIPHTDGNFHPSPLMGGFGLKHPPPQILIKNTPVPADPPTTLNQAKLNSFITQYSTGQVSVEIEWELQKENSKRWNPEIQYTSNYYKSTNVDFAVNTEGTYSEPRPIGTRFLTRNL

SEQ ID NO: 995 - protein, 736 aa, synthetic construct
  VARIANT 113: note = MOD_RES - Any naturally occurring amino acid
  REGION 1..736: note = source = /note="Description of Artificial Sequence: Synthetic polypeptide"
MAADGYLPDWLEDTLSEGIRQWWKLKPGPPPPKPAERHKDDSRGLVLPGYKYLGPFNGLDKGEPVNAADAAALEHDKAYDQQLEAGDNPYLRYNHADAEFQERLQEDTSFGGXLGRAVFQAKKRVLEPLGLVEEGAKTAPGKKRPVEQSPQEPDSSSGIGRKGQQPARKRLNFGQTGDSESVPDPQPLGEPPAAPSGVGPNTMASGGGAPMADNNEGADGVGNASGNWHCDSTWLGDRVITTSTRTWALPTYNNHLYKQISSASTGASNDNHYFGYSTPWGYFDFNRFHCHFSPRDWQRLINNNWGFRPKRLNFKLFNIQVKEVTQNEGTKTIANNLTSTIQVFTDSEYQLPYVLGSAHQGCLPPFPADVFMIPQYGYLTLNNGSQAVGRSSFYCLEYFPSQMLRTGNNFQFTYTFEDVPFHSSYAHSQSLDRLMNPLIDQYLYYLSRTQSTGGTQGTQQLLFSQAGPANMSAQAKNWLPGPCYRQQRVSTTLSQNNNSNFAWTGATKYHLNGRDSLVNPGVAMATHKDDEERFFPSSGVLMFGKQGAGRDNVDYSSVMLTSEEEIKTTNPVATEQYGVVVDNLQQTNTGPIVGNVNSQGALPGMVWQNRDVYLQGPIWAKIPHTDGNFHPSPLMGGFGLKHPPPQILIKNTPVPADPPTAFNKDKLNSFITQYSTGQVSVEIEWELQKENSKRWNPEIQYTSNYYKSNNVEFAVNTEGVYSEPRPIGTRYLTRNL

SEQ ID NO: 996 - DNA, 2211 bp, synthetic construct
  misc_feature 1..2211: note = source = /note="Description of Artificial Sequence: Synthetic polynucleotide"
  misc_feature 1..2211: note = source = /note="AAV9 VP1"
  source 1..2211: mol_type = other DNA
atggccgccgacggctacctgcccgactggctggaggacaacctgagcgagggcatccgcgagtggtgggccctgaagcccggcgccccccagcccaaggccaaccagcagcaccaggacaacgcccgcggcctggtgctgcccggctacaagtacctgggccccggcaacggcctggacaagggcgagcccgtgaacgccgccgacgccgccgccctggagcacgacaaggcctacgaccagcagctgaaggccggcgacaacccctacctgaagtacaaccacgccgacgccgagttccaggagcgcctgaaggaggacaccagcttcggcggcaacctgggccgcgccgtgttccaggccaagaagcgcctgctggagcccctgggcctggtggaggaggccgccaagaccgcccccggcaagaagcgccccgtggagcagagcccccaggagcccgacagcagcgccggcatcggcaagagcggcgcccagcccgccaagaagcgcctgaacttcggccagaccggcgacaccgagagcgtgcccgacccccagcccatcggcgagccccccgccgcccccagcggcgtgggcagcctgaccatggccagcggcggcggcgcccccgtggccgacaacaacgagggcgccgacggcgtgggcagcagcagcggcaactggcactgcgacagccagtggctgggcgaccgcgtgatcaccaccagcacccgcacctgggccctgcccacctacaacaaccacctgtacaagcagatcagcaacagcaccagcggcggcagcagcaacgacaacgcctacttcggctacagcaccccctggggctacttcgacttcaaccgcttccactgccacttcagcccccgcgactggcagcgcctgatcaacaacaactggggcttccgccccaagcgcctgaacttcaagctgttcaacatccaggtgaaggaggtgaccgacaacaacggcgtgaagaccatcgccaacaacctgaccagcaccgtgcaggtgttcaccgacagcgactaccagctgccctacgtgctgggcagcgcccacgagggctgcctgccccccttccccgccgacgtgttcatgatcccccagtacggctacctgaccctgaacgacggcagccaggccgtgggccgcagcagcttctactgcctggagtacttccccagccagatgctgcgcaccggcaacaacttccagttcagctacgagttcgagaacgtgcccttccacagcagctacgcccacagccagagcctggaccgcctgatgaaccccctgatcgaccagtacctgtactacctgagcaagaccatcaacggcagcggccagaaccagcagaccctgaagttcagcgtggccggccccagcaacatggccgtgcagggccgcaactacatccccggccccagctaccgccagcagcgcgtgagcaccaccgtgacccagaacaacaacagcgagttcgcctggcccggcgccagcagctgggccctgaacggccgcaacagcctgatgaaccccggccccgccatggccagccacaaggagggcgaggaccgcttcttccccctgagcggcagcctgatcttcggcaagcagggcaccggccgcgacaacgtggacgccgacaaggtgatgatcaccaacgaggaggagatcaagaccaccaaccccgtggccaccgagagctacggccaggtggccaccaaccaccagagcgcccaggcccaggcccagaccggctgggtgcagaaccagggcatcctgcccggcatggtgtggcaggaccgcgacgtgtacctgcagggccccatctgggccaagatcccccacaccgacggcaacttccaccccagccccctgatgggcggcttcggcatgaagcacccccccccccagatcctgatcaagaacacccccgtgcccgccgacccccccaccgccttcaacaaggacaagctgaacagcttcatcacccagtacagcaccggccaggtgagcgtggagatcgagtgggagctgcagaaggagaacagcaagcgctggaaccccgagatccagtacaccagcaactactacaagagcaacaacgtggagttcgccgtgaacaccgagggcgtgtacagcgagccccgccccatcggcacccgctacctgacccgcaacctgtaa

SEQ ID NO: 997 - DNA, 2211 bp, synthetic construct
  misc_feature 1..2211: note = source = /note="Description of Artificial Sequence: Synthetic polynucleotide"
  source 1..2211: mol_type = other DNA
atggctgccgatggttatcttccagattggctcgaggacactctctctgaaggaataagacagtggtggaagctcaaacctggcccaccaccaccaaagcccgcagagcggcataaggacgacagcaggggtcttgtgcttcctgggtacaagtacctcggacccttcaacggactcgacaagggagagccggtcaacgaggcagacgccgcggccctcgagcacgacaaggcctacgaccagcagctcaaggccggagacaacccgtacctcaagtacaaccacgccgacgccgagttccaggagcggctcaaagaagatacgtcttttgggggcaacctcggacgagcagtcttccaggccaagaagcgggttctcgaacctctcggtctggttgaggaaggcgctaagacggctcctggaaagaaacgtccggtagagcagtcgccacaagagccagactcctcctcgggcattggcaagacaggccagcagcccgctaaaaagagactcaattttggtcagactggcgactcagagtcagtccccgacccacaacctctcggagaacctccagcaacccccgctgctgtgggacctactacaatggcttcaggcggtggcgcaccaatggcggacaataacgaaggcgccgatggagtgggtagttcctcgggaaattggcattgcgattcccaatggctgggggacagagtcatcaccaccagcacccgaacatgggccttgcccacctataacaaccacctctacaagcaaatctccagtgcttcaacgggggccagcaacgacaaccactacttcggctacagcaccccctgggggtattttgacttcaacagattccactgccacttctcaccacgtgactggcagcgactcatcaacaacaactggggattccgacccaagagactcaacttcaagctctttaacattcaagtcaaggaggtcacgcagaatgaaggcaccaagaccatcgccaataacctcaccagcaccatccaggtgtttacggactcggagtaccagctgccgtacgttctcggctccgcccaccagggctgcctgcctccgttcccggcggacgtgttcatgattccccagtacggctacctaacactcaacaacggtagtcaggccgtgggacgctcctccttctactgcctggaatactttccttcgcagatgctgagaaccggcaacaacttccagtttacttacaccttcgaggacgtgcctttccacagcagctacgcccacagccagagcttggaccggctgatgaatcctctgattgaccagtacctgtactacttgtctcggactcaaacaacaggaggcacggcaaatacgcagactctgggcttcagccaaggtgggcctaatacaatggccaatcaggcaaagaactggctgccaggaccctgttaccgccaacaacgcgtctcaacgacaaccgggcaaaacaacaatagcaactttgcctggactgctgggaccaaataccatctgaatggaagaaattcattggctaatcctggcatcgctatggcaacacacaaagacgacaaggagcgtttttttcccagtaacgggatcctgatttttggcaaacaaaatgctgccagagacaatgcggattacagcgatgtcatgctcaccagcgaggaagaaatcaaaaccactaaccctgtggctacagaggaatacggtatcgtggcagataacttgcagcagcaaaacacggctcctcaaattggaactgtcaacagccagggggccttacccggtatggtctggcagaaccgggacgtgtacctgcagggtcccatctgggccaagattcctcacacggacggcaacttccacccgtctccgctgatgggcggctttggcctgaaacatcctccgcctcagatcctgatcaagaacacgcctgtacctgcggatcctccgaccaccttcaaccagtcaaagctgaactctttcatcacgcaatacagcaccggacaggtcagcgtggaaattgaatgggagctgcagaaagaaaacagcaaacgctggaacccagagattcaatacacttccaactactacaaatctacaagtgtggactttgctgttaatacagaaggcgtgtactctgaaccccaccccattggcacccgttacctcacccgtcccctgtaa

SEQ ID NO: 998 - DNA, 2211 bp, synthetic construct
  misc_feature 1..2211: note = source = /note="Description of Artificial Sequence: Synthetic polynucleotide"
  source 1..2211: mol_type = other DNA
atggctgccgatggttatcttccagattggctcgaggacaacctctctgagggcattcgcgagtggtgggcgctgaaacctggagccccgaagcccaaagccaaccagcaaaagcaggacgacggccggggtctggtgcttcctggctacaagtacctcggacccttcaacggactcgacaagggggagccggtcaacgcagcagacgcggcggccctcgagcacgacaaggcctacgaccagcagctcaaggccggagacaacccgtacctcaagtacaaccacgccgacgccgagttccaggagcggctcaaagaagatacgtcttttgggggcaacctcgggcgagcagtcttccaggccaaaaagaggcttcttgaacctcttggtctggttgaggaagcggctaagacggctcctggaaagaagaggcctgtagagcagtctcctcaggaaccggactcctccgcgggtattggcaaatcgggtgcacagcccgctaaaaagagactcaattttggtcagactggcgactcagagtcagtccccgacccacaacctctcggagaacctccagcaacccccgctgctgtgggacctactacaatggcttcaggcggtggcgcaccaatggcagacaataacgaaggcgccgacggagtgggtaatgcctcaggaaattggcattgcgattccacatggctgggcgacagagtcatcaccaccagcacccgaacctgggccctgcccacctacaataaccacctctacaagcaaatctccagtgcttcaacgggggccagcaacgacaaccactacttcggctacagcaccccctgggggtattttgatttcaacagattccactgccacttttcaccacgtgactggcagcgactcatcaacaacaattggggattccggcccaagagactcaacttcaaactcttcaacatccaagtcaaggaggtcacgcagaatgaaggcaccaagaccatcgccaataacctcaccagcaccatccaggtgtttacggactcggagtaccagctgccgtacgttctcggctctgcccaccagggctgcctgcctccgttcccggcggacgtgttcatgattccccagtacggctacctaacactcaacaacggtagtcaggccgtgggacgctcctccttctactgcctggaatactttccttcgcagatgctgagaaccggcaacaacttccagtttacttacaccttcgaggacgtgcctttccacagcagctacgcccacagccagagcttggaccggctgatgaatcctctgattgaccagtacctgtactacttgtctcggactcaaacaacaggaggcacggcaaatacgcagactctgggcttcagccaaggtgggcctaatacaatggccaatcaggcaaagaactggctgccaggaccctgttaccgccaacaacgcgtctcaacgacaaccgggcaaaacaacaatagcaactttgcctggactgctgggaccaaataccatctgaatggaagaaattcattggctaatcctggcatcgctatggcaacacacaaagacgacaaggagcgtttttttcccagtaacgggatcctgatttttggcaaacaaaatgctgccagagacaatgcggattacagcgatgtcatgctcaccagcgaggaagaaatcaaagccactaaccctgtggctacagaggaatacggtatcgtggcagataacttgcagcagcaaaacacggctcctcaaattggaactgtcaacagccagggggccttacccggtatggtttggcagaaccgggacgtgtacctgcagggtcccatctgggccaagattcctcacacggacggcaacttccacccgtctccgctgatgggcggctttggcctgaaacatcctccgcctcagatcctgatcaagaacacgcctgtacctgcggatcctccgaccaccttcaaccagtcaaagctgaactctttcatcacgcaatacagcaccggacaggtcagcgtggaaattgaatgggagctgcagaaggaaaacagcaagcgctggaaccccgagatccagtacacctccaactactacaaatctacaagtgtggactttgctgttaatacagaaggcgtgtactctgaaccccaccccattggcacccgttacctcacccgtcccctgtaa

SEQ ID NO: 999 - DNA, 2214 bp, synthetic construct
  misc_feature 1..2214: note = source = /note="Description of Artificial Sequence: Synthetic polynucleotide"
  source 1..2214: mol_type = other DNA
atggctgccgatggttatcttccagattggctcgaggacaacctctctgagggcattcgcgagtggtgggacttgaaacctggagccccgaagcccaaagccaaccagcaaaagcaggacgacggccggggtctggtgcttcctggctacaagtacctcggacccttcaacggactcgacaagggggagcccgtcaacgcggcggacgcagcggccctcgagcacgacaaggcctacgaccagcagctcaaagcgggtgacaatccgtacctgcggtataaccacgccgacgccgagtttcaggagcgtctgcaagaagatacgtcttttgggggcaacctcgggcgagcagtcttccaggccaagaagcgggttctcgaacctctcggtctggttgaggaaggcgctaatacggctcctggaaagaaacgtccggtagagcagtcgccacaagagccagactcctccgcgggtattggcaaatcgggtgcacagcccgctaaaaagagactcaatttcggtcagactggcgacacagagtcagtcccagaccctcaaccaatcggagaacctcccgcagccccctcaggtgtgggatctcttacaatggcttcaggtggtggcgcaccagtggcagacaataacgaaggtgccgatggagtgggtagttcctcgggaaattggcattgcgattcccaatggctgggggacagagtcatcaccaccagcacccgaacctgggccctgcccacctacaacaatcacctctacaagcaaatctccaacagcacatctggaggatcttcaaatgacaacgcctacttcggctacagcaccccctgggggtattttgacttcaacagattccactgccacttctcaccacgtgactggcagcgactcatcaacaacaactggggattccggcctaagcgactcaacttcaagctcttcaacattcaggtcaaagaggttacggacaacaatggagtcaagaccatcgccaataacctcaccagcaccatccaggtgtttacggactcggagtaccagctgccgtacgttctcggctccgcccaccagggctgcctgcctccgttcccggcggacgtgttcatgattccccagtacggctacctaacactcaacaacggtagtcaggccgtgggacgctcctccttctactgcctggaatactttccttcgcagatgctgagaaccggcaacaacttccagtttacttacaccttcgaggacgtgcctttccacagcagctacgcccacagccagagcttggaccggctgatgaatcctctgattgaccagtacctgtactacttgtctcggactcaaacaacaggaggcacggcaaatacgcagactctgggcttcagccaaggtgggcctaatacaatggccaatcaggcaaagaactggctgccaggaccctgttaccgccaacaacgcgtctcaacgacaaccgggcaaaacaacaatagcaactttgcctggactgctgggaccaaataccatctgaatggaagaaattcattggctaatcctggcatcgctatggcctcacacaaagacgacaaggagcgtttttttcccagtaacgggatcctgatttttggcaaacaaaatgctgccagagacaatgcggattacagcgatgtcatgctcaccagcgaggaagaaatcaaaaccactaaccctgtggctacagaggaatacggtatcgtggcagataacttgcagcagcaaaacacggctcctcaaattggaactgtcaacagtcaaggagccttacctggcatggtctggcagaaccgggacgtgtacctgcagggtcccatctgggccaagattcctcacacggacggcaacttccacccgtctccgctgatgggcggctttggcctgaaacatcctccgcctcagatcctgatcaagaacacgcctgtacctgcggatcctccgaccaccttcaaccagtcaaagctgaactctttcatcacgcaatacagcaccggacaggtcagcgtggaaattgaatgggagctgcagaaggaaaacagcaagcgctggaaccccgagatccagtacaccaccaactactacaaatctacaagtgtggactttgctgttaatacagaaggcgtgtactctgaaccccaccccattggcacccgttacctcacccgtcccctgtaa

SEQ ID NO: 1000 - DNA, 2211 bp, synthetic construct
  misc_feature 1..2211: note = source = /note="Description of Artificial Sequence: Synthetic polynucleotide"
  source 1..2211: mol_type = other DNA
atggctgccgatggttatcttccagattggctcgaggacaacctctctgagggcattcgcgagtggtgggcgctgaaacctggagccccgaagcccaaagccaaccagcaaaagcaggacgacggccggggtctggtgcttcctggctacaagtacctcggacccttcaacggactcgacaaaggagagccggtcaacgaggcggacgcggcagccctcgaacacgacaaagcttacgaccagcagctcaaggccggtgacaatccgtacctgcggtataaccacgccgacgccgagtttcaggagcgtcttcaagaagatacgtcttttgggggcaacctcgggcgagcagtcttccaggccaagaagcgggttctcgaacctctcggtctggttgaggaaggcgctaagacggctcctggaaagaaacgtccggtagagcagtcgccacaagagccagactcctcctcgggcatcggcaagacaggccagcagcccgctaaaaagagactcaattttggtcagactggcgactcagagtcagtccccgacccacaacctctcggagaacctccagcaacccccgctgctgtgggacctactacaatggcttcaggcggtggcgcaccaatggcagacaataacgaaggcgccgacggagtgggtaatgcctcaggaaattggcattgcgattccacatggctgggcgacagagtcatcaccaccagcacccgcacctgggccttgcccacctacaataaccacctctacaagcaaatctccagtgcttcaacgggggccagcaacgacaaccactacttcggctacagcaccccctgggggtattttgactttaacagattccactgccacttttcaccacgtgactggcaaagactcatcaacaacaactggggattccggcccaagagactcaacttcaagctcttcaacatccaggtcaaggaggtcacgcagaatgaaggcaccaagaccatcgccaataaccttaccagcacgattcaggtctttacggactcggaataccagctcccgtacgtcctcggctctgcgcaccagggctgcctccctccgttcccggcggacgtgttcatgattccgcagtacggctacctaacactcaacaacggtagtcaggccgtgggacgctcctccttctactgcctggaatactttccttcgcagatgctgagaaccggcaacaacttccagtttacttacaccttcgaggacgtgcctttccacagcagctacgcccacagccagagcttggaccggctgatgaatcctctgattgaccagtacctgtactacttgtctcggactcaaacaacaggaggcacggcaaatacgcagactctgggcttcagccaaggtgggcctaatacaatggccaatcaggcaaagaactggctgccaggaccctgttaccgccaacaacgcgtctcaacgacaaccgggcaaaacaacaatagcaactttgcctggactgctgggaccaaataccatctgaatggaagaaattcattggctaatcctggcatcgctatggcaacacacaaagacgacaaggagcgtttttttcccagtaacgggatcctgatttttggcaaacaaaatgctgccagagacaatgcggattacagcgatgtcatgctcaccagcgaggaagaaatcaaaaccactaaccctgtggctacagaggaatacggtatcgtggcagataacttgcagcagcaaaacacggctcctcaaattggaactgtcaacagccagggggccttacccggtatggtctggcagaaccgggacgtgtacctgcagggtcccatctgggccaagattcctcacacggacggcaacttccacccgtctccgctgatgggcggctttggcctgaaacatcctccgcctcagatcctgatcaagaacacgcctgtacctgcggatcctccgaccaccttcaaccagtcaaagctgaactctttcatcacgcaatacagcaccggacaggtcagcgtggaaattgaatgggagctgcagaaggaaaacagcaagcgctggaaccccgagatccagtacacctccaactactacaaatctacaagtgtggactttgctgttaatacagaaggcgtgtactctgaaccccaccccattggcacccgttacctcacccgtcccctgtaa

SEQ ID NO: 1001 - DNA, 2211 bp, synthetic construct
  misc_feature 1..2211: note = source = /note="Description of Artificial Sequence: Synthetic polynucleotide"
  source 1..2211: mol_type = other DNA
atggctgccgatggttatcttccagattggctcgaggacaacctctctgagggcattcgcgagtggtgggcgctgaaacctggagccccgaagcccaaagccaaccagcaaaagcaggacgacggccggggtctggtgcttcctggctacaagtacctcggacccttcaacggactcgacaaaggagagccggtcaacgaggcggacgcggcagccctcgaacacgacaaagcttacgaccagcagctcaaagcgggtgacaatccgtacctgcggtataaccacgccgacgccgagtttcaggagcgtctgcaagaagatacgtcttttgggggcaacctcgggcgagcagtcttccaggccaagaagagggttctcgaaccttttggtctggttgaggaaggtgctaagacggctcctggaaagaaacgtccggtagagcagtcgccacaagagccagactcctcctcgggcattggcaagacaggccagcagcccgctaaaaagagactcaattttggtcagactggcgactcagagtcagtccccgacccacaacctctcggagaacctccagcaacccccgctgctgtgggacctactacaatggcttcaggcggtggcgcaccaatggcagacaataacgaaggcgccgacggagtgggtaatgcctcaggaaattggcattgcgattcccaatggctgggcgacagagtcatcaccaccagcaccagaacctgggccttgcccacctataacaaccacctctacaagcaaatctccagtgcttcaacgggggccagcaacgacaaccactacttcggctacagcaccccctgggggtattttgatttcaacagattccactgccacttctcaccacgtgactggcagcgactcatcaacaacaactggggattccggcctaagcgactcaacttcaagctcttcaacattcaggtcaaagaggttacggacaacaatggagtcaagaccatcgccaataaccttaccagcacggttcaagtcttctcggactcggagtaccagttgccgtacgtcctcggctctgcgcaccagggctgcctccctccgttcccggcggacgtgttcatgattccccagtacggctacctaacactcaacaacggtagtcaggccgtgggacgctcctccttctactgcctggaatactttccttcgcagatgctgagaaccggcaacaacttccagtttacttacaccttcgaggacgtgcctttccacagcagctacgcgcacagccagagcttggaccggctgatgaatcctctgattgaccagtacctgtactacttgtctcggactcaaacaacaggaggcacggcaaatacgcagactctgggcttcagccaaggtgggcctaatacaatggccaatcaggcaaagaactggctgccaggaccctgttaccgccaacaacgcgtctcaacgacaaccgggcaaaacaacaatagcaactttgcctggactgctgggaccaaataccatctgaatggaagaaattcattggctaatcctggcatcgctatggcaacacacaaagacgacaaggagcgtttttttcccagtaacgggatcctgatttttggcaaacaaaatgctgccagagacaatgcggattacagcgatgtcatgctcaccagcgaggaagaaatcaaaaccactaaccctgtggctacagaggaatacggtatcgtggcagataacttgcagcagcaaaacacggctcctcaaattggaactgtcaacagccagggggccttacccggtatggtctggcagaaccgggacgtgtacctgcagggtcccatctgggccaagattcctcacacggacggcaacttccacccgtctccgctgatgggcggctttggcctgaaacatcctccgcctcagatcctgatcaagaacacgcctgtacctgcggatcctccgaccaccttcaaccagtcaaagctgaactctttcatcacgcaatacagcaccggacaggtcagcgtggaaattgaatgggagctgcagaaggaaaacagcaagcgctggaaccccgagatccagtacacctccaactactacaaatctacaagtgtggactttgctgttaatacagaaggcgtgtactctgaaccccaccccattggcacccgttacctcacccgtcccctgtaa

SEQ ID NO: 1002 - DNA, 2244 bp, synthetic construct
  misc_difference 2241: note = modified_base - a, c, t, or g
  misc_feature 1..2244: note = source = /note="Description of Artificial Sequence: Synthetic polynucleotide"
  source 1..2244: mol_type = other DNA
atggctgccgatggttatcttccagattggctcgaggacactctctctgaaggaataagacagtggtggaagctcaaacctggcccaccaccaccaaagcccgcagagcggcataaggacgacagcaggggtcttgtgcttcctgggtacaagtacctcggacccttcaacggactcgacaagggagagccggtcaacgaggcagacgccgcggccctcgagcacgacaaagcctacgaccggcagctcgacagcggagacaacccgtacctcaagtacaaccacgccgacgcggagtttcaggagcgccttaaagaagatacgtcttttgggggcaacctcgggcgagcagtcttccaggccaagaagagggttctcgaaccttttggtctggttgaggaaggtgctaagacggctcctggaaagaaacgtccggtagagcagtcgccacaagagccagactcctcctcgggcattggcaagacaggccagcagcccgctaaaaagagactcaattttggtcagactggcgactcagagtcagtccccgacccacaacctctcggagaacctccagcaacccccgctgctgtgggacctactacaatggcttcaggcggtggcgcaccaatggcagacaataacgaaggcgccgacggagtgggtaatgcctcaggaaattggcattgcgattccacatggctgggcgacagagtcatcaccaccagcacccgaacatgggccttgcccacctataacaaccacctctacaagcaaatctccagtgcttcaacgggggccagcaacgacaaccactacttcggctacagcaccccctgggggtattttgacttcaacagattccactgccacttctcaccacgtgactggcagcgactcatcaacaacaactggggattccggcctaagcgactcaacttcaagctcttcaacattcaggtcaaagaggttacggacaacaatggagtcaagaccatcgccaataaccttaccagcacggtccaggtcttcacggactcagactatcagctcccgtacgtgctcgggtcggctcacgagggctgcctcccgccgttcccagcggacgttttcatgattcctcagtacggctacctaacactcaacaacggtagtcaggccgtgggacgctcctccttctactgcctggaatactttccttcgcagatgctgagaaccggcaacaacttccagtttacttacaccttcgaggacgtgcctttccacagcagctacgcgcacagccagagcttggaccggctgatgaatcctctgattgaccagtacctgtactacttgtctcggactcaaacaacaggaggcacggcaaatacgcagactctgggcttcagccaaggtgggcctaatacaatggccaatcaggcaaagaactggctgccaggaccctgttaccgccaacaacgcgtctcaacgacaaccgggcaaaacaacaatagcaactttgcctggactgctgggaccaaataccatctgaatggaagaaattcattggctaatcctggcatcgctatggcaacacacaaagacgacaaggagcgtttttttcccagtaacgggatcctgatttttggcaaacaaaatgctgccagagacaatgcggattacagcgatgtcatgctcaccagcgaggaagaaatcaaaaccactaaccctgtggctacagaggaatacggtatcgtggcagataacttgcagcagcaaaacacggctcctcaaattggaactgtcaacagccagggggccttacccggtatggtctggcagaaccgggacgtgtacctgcagggtcccatctgggccaagattcctcacacggacggcaacttccacccgtctccgctgatgggcggctttggcctgaaacatcctccgcctcagatcctgatcaagaacacgcctgtacctgcggatcctccgaccaccttcaaccagtcaaagctgaactctttcatcacgcaatacagcaccggacaggtcagcgtggaaattgaatgggagctgcagaaggaaaacagcaagcgctggaaccccgagatccagtacacctccaactactacaaatctacaagtgtggactttgctgttaatacagaaggcgtgtactctgaaccccaccccattggcaccagatacctgactcgtaatctgtaattgcttgttaatcaataaaccgtttaattnttt

SEQ ID NO: 1003 - DNA, 2217 bp, synthetic construct
  misc_feature 1..2217: note = source = /note="Description of Artificial Sequence: Synthetic polynucleotide"
  source 1..2217: mol_type = other DNA
atggctgccgatggttatcttccagattggctcgaggacaacctctctgagggcattcgcgagtggtgggacttgaaacctggagccccgaaacccaaagccaaccagcaaaagcaggacgacggccggggtctggtgcttcctggctacaagtacctcggacccttcaacggactcgacaagggggagcccgtcaacgcggcggacgcagcggccctcgagcacgacaaggcctacgaccagcagctccaagcgggtgacaatccgtacctgcggtataaccacgccgacgccgagtttcaggagcgtctgcaagaagatacgtcttttgggggcaacctcggacgagcagtcttccaggcgaaaaagagggttctcgaacctctcggtctggttgaggaaggcgctaagacggctcctggaaagaagagaccggtagagccatcaccccagcgttctccagactcctctacgggcatcggcaagaaaggccaacagcccgccagaaaaagactcaattttggtcagactggcgactcagagtcagttccagaccctcaacctctcggagaacctccagcagcgccctctggtgtgggacctaatacaatggctgcaggcggtggcgcaccaatggcagacaataacgaaggcgccgacggagtgggtagttcctcgggaaattggcattgcgattcccaatggctgggggacagagtcatcaccaccagcacccgaacctgggccctgcccacctacaacaatcacctctacaagcaaatctccaacagcacatctggaggatcttcaaatgacaacgcctacttcggctacagcaccccctgggggtattttgacttcaaccgcttccactgccacttctcaccacgtgactggcagcgactcatcaacaacaactggggattccggcccaagagactcagcttcaaactcttcaacatccaggtcaaggaggtcacgcagaatgaaggcaccaagaccatcgccaataacctcaccagcaccatccaggtgtttacggactcggagtaccagctgccgtacgttctcggctctgcccaccagggctgcctgcctccgttcccggcggacgtgttcatgattcctcagtacggctacctaacgctcaacaatggcagccaggcagtgggacggtcatccttttactgcctggaatatttcccatcgcagatgctgagaacgggcaacaactttaccttcagctacacctttgaggacgttcctttccacagcagctacgctcacagccagagtctggaccgtctcatgaatcctctgattgaccagtacctgtactacttgtctcggactcaaacaacaggaggcacggcaaatacgcagactctgggcttcagccaaggtgggcctaatacaatggccaatcaggcaaagaactggctgccaggaccctgttaccgccaacaacgcgtctcaacgacaaccgggcaaaacaacaatagcaactttgcctggactgctgggaccaaataccatctgaatggaagaaattcattggctaatcctggcatcgctatggcaacacacaaagacgacaaggagcgtttttttcccagtaacgggatcctgatttttggcaaacaaaatgctgccagagacaatgcggattacagcgatgtcatgctcaccagcgaggaagaaatcaaaaccactaaccctgtggctacagaggaatacggtatcgtggcagataacttgcagcagcaaaacacggctcctcaaattggaactgtcaacagccagggggccttacccggtatggtctggcagaaccgggacgtgtacctgcagggtcccatctgggccaagattcctcacacggacggcaacttccacccgtctccgctgatgggcggctttggacttaagcacccgcctcctcagatcctcatcaaaaacacgcctgttcctgcggatcctccgaccaccttcaaccagtcaaagctgaactctttcatcacgcaatacagcaccggacaggtcagcgtggaaattgaatgggagctgcagaaggaaaacagcaagcgctggaaccccgagatccagtacacctccaactactacaaatctacaagtgtggactttgctgttaatacagaaggcgtgtactctgaaccccaccccattggcacccgttacctcacccgtcccctgtaa

SEQ ID NO: 1004 - DNA, 2214 bp, synthetic construct
  misc_feature 1..2214: note = source = /note="Description of Artificial Sequence: Synthetic polynucleotide"
  source 1..2214: mol_type = other DNA
atggctgccgatggttatcttccagattggctcgaggacaacctctctgagggcattcgcgagtggtgggacttgaaacctggagccccgaagcccaaagccaaccagcaaaagcaggacgacggccggggtctggtgcttcctggctacaagtacctcggacccttcaacggactcgacaagggggagcccgtcaacgcggcggatgcagcggccctcgagcacgacaaagcctacgaccagcagctcaaagcgggtgacaatccgtacctgcggtataaccacgccgacgccgagtttcaggagcgtctgcaagaagatacgtcttttgggggcaacctcgggcgagcagtcttccaggccaagaagagggttctcgaaccttttggtctggttgaggaaggtgctaagacggctcctggaaagaaacgtccggtagagcagtcgccacaagagccagactcctcctcgggcattggcaagacaggccagcagcccgctaaaaagagactcaattttggtcagactggcgactcagagtcagtccccgacccacaacctctcggagaacctccagcaacccccgctgctgtgggacctactacaatggcttcaggcggtggcgcacccatgcaagacaataacgaaggcgccgacggagtgggtagttcctcgggaaattggcattgcgattccacatggctgggcgacagagtcatcaccaccagcacccgaacctgggccctgcccacctacaacaaccacctctacaagcaaatctccaacgggacatcgggaggagccaccaacgacaacacctacttcggctacagcaccccctgggggtattttgactttaacagattccactgccacttttcaccacgtgactggcagcgactcatcaacaacaactggggattccggcccaagagactcaacttcaagctcttcaacatccaggtcaaggaggtcacgcagaatgaaggcaccaagaccatcgccaataaccttaccagcacgattcaggtctttacggattcggaataccagctcccgtacgtcctcggctctgcgcaccagggctgcctccctccgttcccggcggacgtgttcatgattccgcagtacggctacctaacgctcaacaatggtagccaggcagtgggacggtcatccttttactgcctggaatatttcccatcgcagatgctgagaacgggcaacaactttaccttcagctacacctttgaggacgttcctttccacagcagctacgctcacagccagagtctggaccgtctcatgaatcctctgattgaccagtacctgtactacttgtctcggactcaaacaacaggaggcacggcaaatacgcagactctgggcttcagccaaggtgggcctaatacaatggccaatcaggcaaagaactggctgccaggaccctgttaccgccaacaacgcgtctcaacgacaaccgggcaaaacaacaatagcaactttgcctggactgctgggaccaaataccatctgaatggaagaaattcattggctaatcctggcatcgctatggcaacacacaaagacgacaaggagcgtttttttcccagtaacgggatcctgatttttggcaaacaaaatgctgccagagacaatgcggattacagcgatgtcatgctcaccagcgaggaagaaatcaaaaccactaaccctgtggctacagaggaatacggtatcgtggcagataacttgcagcagcaaaacacggctcctcaaattggaactgtcaacagccagggggccttacccggtatggtctggcagaaccgggacgtgtacctgcagggtcccatctgggccaagattcctcacacggacggcaacttccacccgtctccgctgatgggcggctttggcctgaaacatcctccgcctcagatcctgatcaagaacacgcctgtacctgcggatcctccgaccaccttcaaccagtcaaagctgaactctttcatcacgcaatacagcaccggacaggtcagcgtggaaattgaatgggagctgcagaaggaaaacagcaagcgctggaaccccgagatccagtacacctccaactactacaaatctacaagtgtggactttgctgttaatacagaaggcgtgtactctgaaccccaccccattggcacccgttacctcacccgtcccctgtaa

SEQ ID NO: 1005 - DNA, 2211 bp, synthetic construct
  misc_feature 1..2211: note = source = /note="Description of Artificial Sequence: Synthetic polynucleotide"
  source 1..2211: mol_type = other DNA
atggctgccgatggttatcttccagattggctcgaggacaacctctctgagggcattcgcgagtggtgggcgctgaaacctggagccccgaagcccaaagccaaccagcaaaagcaggacgacggccggggtctggtgcttcctggctacaagtacctcggacccttcaacggactcgacaagggggagcccgtcaacgcggcggacgcagcggccctcgagcacgacaaggcctacgaccagcagctcaaagcgggtgacaatccgtacctgcggtataaccacgccgacgccgagtttcaggagcgtctgcaagaagatacgtcttttgggggcaacctcgggcgagcagtcttccaggccaagaagcgggttctcgaacctctcggtctggttgaggaaggcgctaagacggctcctggaaagaaacgtccggtagagcagtcgccacaagagccagactcctcctcgggcatcggcaagacaggccagcagcccgctaaaaagagactcaattttggtcagactggcgactcagagtcagtccccgacccacaacctctcggagaacctccagcaacccccgctgctgtgggacctactacaatggcttcaggcggtggcgcaccaatggcagacaataacgaaggcgccgacggagtgggtagttcctcgggaaattggcattgcgattccacatggctgggcgacagagtcatcaccaccagcacccgcacctgggccttgcccacctacaataaccacctctacaagcaaatctccagtgcttcaacgggggccagcaacgacaaccactacttcggctacagcaccccctgggggtattttgacttcaacagattccactgccacttctcaccacgtgactggcagcgactcatcaacaacaactggggattccggcctaagcgactcaacttcaagctcttcaacattcaggtcaaagaggttacggacaacaatggagtcaagaccatcgccaataaccttaccagcacggtccaggtcttcacggactcagactatcagctcccgtacgtgctcgggtcggctcacgagggctgcctcccgccgttcccagcggacgttttcatgattcctcagtacgggtatctgacgctcaacaatggcagccaggcagtgggacggtcatccttttactgcctggaatatttcccatcgcagatgctgagaacgggcaataactttaccttcagctacaccttcgaggacgtgcctttccacagcagctacgcgcacagccagagcctggaccggctgatgaatcctctgattgaccagtacctgtactacttgtctcggactcaaacaacaggaggcacggcaaatacgcagactctgggcttcagccaaggtgggcctaatacaatggccaatcaggcaaagaactggctgccaggaccctgttaccgccaacaacgcgtctcaacgacaaccgggcaaaacaacaatagcaactttgcctggactgctgggaccaaataccatctgaatggaagaaattcattggctaatcctggcatcgctatggcaacacacaaagacgacaaggagcgtttttttcccagtaacgggatcctgatttttggcaaacaaaatgctgccagagacaatgcggattacagcgatgtcatgctcaccagcgaggaagaaatcaaaaccactaaccctgtggctacagaggaatacggtatcgtggcagataacttgcagcagcaaaacacggctcctcaaattggaactgtcaacagccagggggccttacccggtatggtctggcagaaccgggacgtgtacctgcagggtcccatctgggccaagattcctcacacggacggcaacttccacccgtctccgctgatgggcggctttggcctgaaacatcctccgcctcagatcctgatcaagaacacgcctgtacctgcggatcctccgaccaccttcaaccagtcaaagctgaactctttcatcacgcaatacagcaccggacaggtcagcgtggaaattgaatgggagctgcagaaggaaaacagcaagcgctggaaccccgagatccagtacacctccaactactacaaatctacaagtgtggactttgctgttaatacagaaggcgtgtactctgaaccccaccccattggcacccgttacctcacccgtcccctgtaa

SEQ ID NO: 1006 - DNA, 2214 bp, synthetic construct
  misc_feature 1..2214: note = source = /note="Description of Artificial Sequence: Synthetic polynucleotide"
  source 1..2214: mol_type = other DNA
atggctgccgatggttatcttccagattggctcgaggacaacctctctgagggcattcgcgagtggtgggacttgaaacctggagccccgaaacccaaagccaaccagcaaaagcaggacgacggccggggtctggtgcttcctggctacaagtacctcggacccttcaacggactcgacaagggggagcccgtcaacgcggcggatgcagcggccctcgagcacgacaaggcctacgaccagcagctcaaagcgggtgacaatccgtacctgcggtataaccacgccgacgccgagtttcaggagcgtctgcaagaagatacgtcttttgggggcaacctcgggcgagcagtcttccaggccaagaagcgggttctcgaacctctcggtctggttgaggaaggcgctaagacggctcctggaaagaagagaccggtagagccatcaccccagcgttctccagactcctctacgggcatcggcaagaaaggccaacagcccgccagaaaaagactcaattttggtcagactggcgactcagagtcagtccccgacccacaacctctcggagaacctccagcaacccccgctgctgtgggacctactacaatggcttcaggcggtggcgcaccaatggcagacaataacgaaggcgccgacggagtgggtaatgcctcaggaaattggcattgcgattccacatggctgggcgacagagtcatcaccaccagcacccgaacatgggccttgcccacctataacaaccacctctacaagcaaatctccagtgcttcaacgggggccagcaacgacaaccactacttcggctacagcaccccctgggggtattttgatttcaacagattccactgccatttctcaccacgtgactggcagcgactcatcaacaacaatttgggatcccggcccaagagactcaacttcaagctcttcatcatccaagtcaaggaggtcacgacgaatgatggcgtcacgaccatcgctaataaccttaccagcacggttcaagtcttctcggactcggagtaccagttgccgtacgtcctcggctctgcgcaccagggctgcctccctccgttcccggcggacgtgttcatgattccgcagtacggctacctaacgctcaacaatggcagccaggcagtgggacggtcatccttttactgcctggaatatttcccatcgcagatgctgagaacgggcaataactttaccttcagctacaccttcgaggacgtgcctttccacagcagctacgcgcacagccagagcctggaccggctgatgaatcctctcatcgaccagtacctgtattacctgaacagaactcagaatcagtccggaagtgcccaaaacaaggacttgctgtttagccgggggtctccagctggcatgtctgttcagcccaaaaactggctacctggaccctgttaccggcagcagcgcgtttctaaaacaaaaacagacaacaacaacagcaactttacctggactggtgcttcaaaatataaccttaatgggcgtgaatctataatcaaccctggcactgctatggcctcacacaaagacgacaaagacaagttctttcccatgagcggtgtcatgatttttggaaaggagagcgccggagcttcaaacactgcattggacaatgtcatgatcacagacgaagaggaaatcaaagccactaaccccgtggccaccgaaagatttgggactgtggcagtcaatctccagagcagcagcacagaccctgcgaccggagatgtgcatgttatgggagccttacctggaatggtgtggcaagacagagacgtatacctgcagggtcctatttgggccaaaattcctcacacggatggacactttcacccgtctcctctcatgggcggctttggacttaagcacccgcctcctcagatcctcatcaaaaacacgcctgttcctgcgaatcctccggcagagttttcggctacaaagtttgcttcattcatcacccagtattccacaggacaagtgagcgtggagattgaatgggagctgcagaaagaaaacagcaaacgctggaatcccgaagtgcagtatacatctaactatgcaaaatctgccaacgttgatttcactgtggacaacaatggactttatactgagcctcgccccattggcacccgttacctcacccgtcccctgtaa

SEQ ID NO: 1007 - DNA, 2211 bp, synthetic construct
  misc_feature 1..2211: note = source = /note="Description of Artificial Sequence: Synthetic polynucleotide"
  source 1..2211: mol_type = other DNA
atggctgccgatggttatcttccagattggctcgaggacaacctctctgagggcattcgcgagtggtgggcgctgaaacctggagccccgaaacccaaagccaaccagcaaaagcaggacgacggccggggtctggtgcttcctggctacaagtacctcggacccttcaacggactcgacaagggggagcccgtcaacgcggcggacgcagcggccctcgagcacgacaaggcctacgaccagcagctcaaggcgggtgacaatccgtacctgcggtataaccacgccgacgccgagtttcaggagcgtctgcaagaagatacgtcttttgggggcaacctcgggcgagcagtcttccaggccaaaaagaggcttcttgaacctcttggtctggttgaggaagcggctaagacggctcctggaaagaaacgtccggtagagcagtcgccacaagagccagactcctcctcgggcattggcaagacaggccagcagcccgctaaaaagagactcaactttgggcagactggcgactcagagtcagtgcccgaccctcaaccaatcggagaacctccagcaacccccgctgctgtgggacctactacaatggcttcaggcggtggcgcaccaatggcggacaataacgaaggcgccgatggagtgggtaattcctcgggaaattggcattgcgattccacatggctgggcgacagagtcatcaccaccagcacccgaacctgggccctgcccacctacaacaatcacctctacaagcaaatctccagtgcttcaacgggggccagcaacgacaaccactacttcggctacagcaccccctgggggtattttgatttcaacagattccactgccacttttcaccacgtgactggcagcgactcatcaacaacaactggggattccggcccaagagactcaacttcaagctcttcaacatccaggtcaaggaggtcacgcagaatgaaggcaccaagaccatcgccaataacctcaccagcaccatccaggtgtttacggactcggagtaccagctgccgtacgttctcggctccgcccaccagggctgcctgcctccgttcccggcggacgtgttcatgattccgcagtacggctacctaacgctcaacaatggcagccaggcagtgggacggtcatccttttactgcctggaatatttcccatcgcagatgctgagaacgggcaacaactttaccttcagctacacctttgaggacgttcctttccacagcagctacgctcacagccagagtctggaccgtctcatgaatcctctgattgaccagtacctgtactacttgtctcggactcaaacaacaggaggcacggcaaatacgcagactctgggcttcagccaaggtgggcctaatacaatggccaatcaggcaaagaactggctgccaggaccctgttaccgccaacaacgcgtctcaacgacaaccgggcaaaacaacaatagcaactttgcctggactgctgggaccaaataccatctgaatggaagaaattcattggctaatcctggcatcgctatggcaacacacaaagacgacaaggagcgtttttttcccagtaacgggatcctgatttttggcaaacaaaatgctgccagagacaatgcggattacagcgatgtcatgctcaccagcgaggaagaaatcaaaaccactaaccctgtggctacagaggaatacggtatcgtggcagataacttgcagcagcaaaacacggctcctcaaattggaactgtcaacagccagggggccttacccggtatggtctggcagaaccgggacgtgtacctgcagggtcccatctgggccaagattcctcacacggacggcaacttccacccgtctccgctgatgggcggctttggcctgaaacatcctccgcctcagatcctgatcaagaacacgcctgtacctgcggatcctccgaccaccttcaaccagtcaaagctgaactctttcatcacgcaatacagcaccggacaggtcagcgtggaaattgaatgggagctgcagaaggaaaacagcaagcgctggaaccccgagatccagtacacctccaactactacaaatctacaagtgtggactttgctgttaatacagaaggcgtgtactctgatccccaccccattggcacccgttacctcacccgtcccctgtaa

SEQ ID NO: 1008 - DNA, 2211 bp, synthetic construct
  misc_feature 1..2211: note = source = /note="Description of Artificial Sequence: Synthetic polynucleotide"
  source 1..2211: mol_type = other DNA
atggctgccgatggttatcttccagattggctcgaggacaacctctctgagggcattcgcgagtggtgggcgctgaaacctggagccccgaagcccaaagccaaccagcaagagcaggacgacggccggggtctggtgcttcctggctacaagtacctcggacccttcaacggactcgacaagggagagcccgtcaacgcggcggatgcagcggccctcgagcacgacaaagcctacgaccagcagctcaaagcgggtgacaatccgtacctgcggtataaccacgccgacgccgagtttcaggagcgtctgcaagaagatacgtcttttgggggcaacctcgggcgagcagtcttccaggccaagaagagggttctcgaaccttttggtctggttgaggaaggtgctaagacggctcctggaaagaaacgtccggtagagcagtcgccacaagagccagactcctcctcgggcattggcaagacaggccagcagcccgctaaaaagagactcaattttggtcagactggcgactcagagtcagttccagaccctcaacctctcggagaacctccagcagcgccctctggtgtgggacctaatacaatggctgcaggcggtggcgcaccaatggcagacaataacgaaggcgccgacggagtgggtagttcctcgggaaattggcattgcgattccacatggctgggcgacagagtcatcaccaccagcacccgaacctgggccctgcccacctacaacaaccacctctacaagcaaatctccagtgcttcaacgggggccagcaacgacaaccactacttcggctacagcaccccctgggggtattttgactttaacagattccactgccacttttcaccacgtgactggcagcgactcatcaacaacaactggggattccggcccaagagactcaacttcaagctcttcaacatccaggtcaaggaggtcacgcagaatgaaggcaccaagaccatcgccaataaccttaccagcacgattcaggtctttacggattcggaataccagctcccgtacgtcctcggctctgcgcaccagggctgcctccctccgttcccggcggacgtgttcatgattccgcagtacggctacctaacgctcaacaatggtagccaggcagtgggacggtcatcctttttctgcctggaatatttcccatcgcagatgctgagaacgggcaacaactttaccttcagctacacctttgaggacgttcctttccacagcagctacgctcacagccagagtctggaccgtctcatgaatcctctgattgaccagtacctgtactacttgtctcggactcaaacaacaggaggcacggcaaatacgcagactctgggcttcagccaaggtgggcctaatacaatggccaatcaggcaaagaactggctgccaggaccctgttaccgccaacaacgcgtctcaacgacaaccgggcaaaacaacaatagcaactttgcctggactgctgggaccaaataccatctgaatggaagaaattcattggctaatcctggcatcgctatggcaacacacaaagacgacaaggagcgtttttttcccagtaacgggatcctgatttttggcaaacaaaatgctgccagagacaatgcggattacagcgatgtcatgctcaccagcgaggaagaaatcaaaaccactaaccctgtggctacagaggaatacggtatcgtggcagataacttgcagcagcaaaacacggctcctcaaattggaactgtcaacagccagggggccttacccggtatggtctggcagaaccgagacgtgtacctgcagggtcccatctgggccaagattcctcacacggacggcaacttccacccgtctccgctgatgggcggctttggcctgaaacatcctccgcctcagatcctgatcaagaacacgcctgtacctgcggatcctccgaccaccttcaaccagtcaaagctgaactctttcatcacgcaatacagcaccggacaggtcagcgtggaaattgaatgggagctgcagaaggaaaacagcaagcgctggaaccccgagatccagtacacctccaactactacaaatctacaagtgtggactttgctgttaatacagaaggcgtgtactctgaaccccaccccattggcacccgttacctcacccgtcccctgtaa

SEQ ID NO: 1009 - DNA, 2211 bp, synthetic construct
  misc_feature 1..2211: note = source = /note="Description of Artificial Sequence: Synthetic polynucleotide"
  source 1..2211: mol_type = other DNA
atggctgccgatggttatcttccagattggctcgaggacaacctctctgagggcattcgcgagtggtgggacttgaaacctggagccccgaagcccaaagccaaccagcaaaagcaggacgacggccggggtctggtgcttcctggctacaagtacctcggacccttcaacggactcgacaagggggagcccgtcaacgcggcggacgcagcggccctcgagcacgacaaggcctacgaccagcagctcaaagcgggtgacaatccgtacctgcggtataaccacgccgacgccgagtttcaggagcgtctgcaagaagatacgtcttttgggggcaacctcgggcgagcagtcttccaggccaagaagcgggttctcgaacctctcggtctggttgaggaaggcgctaagacggctcctggaaagaaacgtccggtagagcagtcaccacaagagccagactcctcctcgggcatcggcaagacaggccagcagcccgctaaaaagagactcaattttggtcagactggcgactcagagtcagtccccgacccacaacctctcggagaacctccagcaacccccgctgctgtgggacctactacaatggcttcaggcggtggcgcaccaatggcggacaataacgaaggcgccgacggagtgggtaatgcctcaggaaattggcattgcgattccacatggctgggcgacagagtcatcaccaccagcacccgaacatgggccttgcccacctataacaaccacctctacaagcaaatctccagtgcttcaacgggggccagcaacgacaaccactacttcggctacagcaccccctgggggtattttgatttcaacagattccactgccatttctcaccacgtgactggcagcgactcatcaacaacaattggggattccggcccaagagactcaacttcaagctcttcaacatccaagtcaaggaggtcacgacgaatgatggcgtcacgaccatcgctaataaccttaccagcacggttcaagtcttctcggactcggagtaccagttgccgtacgtcctcggctctgcgcaccagggctgcctccctccgttcccggcggacgtgttcatgattccgcagtacggctacctaacgctcaacaatggcagccaggcagtgggacggtcatccttttactgcctggaatatttcccatcgcagatgctgagaacgggcaataactttaccttcagctacaccttcgaggacgtgcctttccacagcagctacgcgcacagccagagcctggaccggctgatgaatcctctcatcgaccagtacctgtattacctgaacagaactcagaatcagtccggaagtgcccaaaacaaggacttgctgtttagccgggggtctccagctggcatgtctgttcagcccaaaaactggctacctggaccctgttaccggcagcagcgcgtttctaaaacaaaaacagacaacaacaacagcaactttacctggacaggtgcttcaaaatataaccttaatgggcgtgaatctataatcaaccctggcactgctatggcctcacacaaagacgacaaagacaagttctttcccatgagcggtgtcatgatttttggaaaggagagcgccggagcttcaaacactgcattggacaatgtcatgatcacagacgaagaggaaatcaaagccactaaccccgtggccaccgaaagatttgggactgtggcagtcaatctccagaacagcagcacagaccctgcgaccggagatgtgcatgttatgggagccttacctggaatggtgtggcaagacagagacgtatacctgcagggtcctatttgggccaaaattcctcacacggatggacactttcacccgtctcctctcatgggcggctttggacttaagcacccgcctcctcagatcctcatcaaaaacacgcctgttcctgcgaatcctccggcagagttttcggctacaaagtttgcttcattcatcacccagtattccacaggacaagtgagcgtggagattgaatgggagctgcagaaagaaaacagcaaacgctggaatcccgaagtgcagtatacatctaactatgcaaaatctgccaacgttgatttcactgtagacaacaatggactttatactgtgcctcgccccattggcacccgttacctcacccgtcccctgtaa

SEQ ID NO: 1010 - DNA, 2211 bp, synthetic construct
  misc_feature 1..2211: note = source = /note="Description of Artificial Sequence: Synthetic polynucleotide"
  source 1..2211: mol_type = other DNA
atggctgccgatggttatcttccagattggctcgaggacaacctctctgagggcattcgcgagtggtgggcgctgaaacctggagccccgaagcccaaagccaaccagcaaaagcaggacgacggccggggtctggtgcttcctggctacaagtacctcggacccttcaacggactcgacaaaggagagccggtcaacgcggcggacgcggcggccctcgaacacgacaaggcttacgaccagcagctcaaggcgggtgacaacccctacctgcggtataaccacgccgacgccgagttccaggagcggctgcaagaagatacgtcttttgggggcaacctcgggcgagcagtcttccaggccaaaaagaggcttcttgaacctcttggtctggttgaggaaggcgctaagacggctcctggaaagaagaggcctgtagagcagtctcctcaagaaccggactcctcctcgggtattggcaaaacaggtgagcagcccgctaaaaagagactcaattttggtcagactggcgactcagagtcagtccccgacccacaacctctcggagaacctccagcaacccccgctgctgtgggacctactacaatggcttcaggcggtggcgcaccaatggcagacaataacgaaggcgccgacggagtgggtagtgcctcaggaaattggcattgcgattccacatggctgggcgacagagtcatcaccaccagcacccgaacctgggccctgcccacctataacaaccatctctacaagcaaatctccagtgcttcaacgggggccagcaacgacaaccactacttcggctacagcaccccctgggggtattttgacttcaacagattccactgccacttctcaccacgtgactggcagcgactcatcaacaacaactggggattccggcctaagcgactcaacttcaagctcttcaacattcaggtcaaagaggttacggacaacaatggagtcaagaccatcgccaataacctcaccagcaccatccaggtgttcacggactcagagtatcagctgccgtacgtgctcgggtcggctcaccagggctgcctccctccgttcccagcggacgtgttcatgattcctcagtacgggtatctgacactcaacaacggcagtcaggcagtgggacggtcatccttctactgcctggaatattttccatcgcagatgctgagaaccggcaacaactttccgttcagttacaccttcgaggacgtgcctttccacagcagctacgcgcacagccagagcctggaccggctgatgaatcctctgattgaccagtacctgtactacttgtctcggactcaaacaacaggaggcacggcaaatacgcagactctgggcttcagccaaggtgggcctaatacaatggccaatcaggcaaagaactggctgccaggaccctgttaccgccaacaacgcgtctcaacgacaaccgggcaaaacaacaatagcaactttgcctggactgctgggaccaaataccatctgaatggaagaaattcattggctaatcctggcatcgctatggcaacacacaaagacgacaaggagcgtttttttcccagtaacgggatcctgatttttggcaaacaaaatgctgccagagacaatgcggattacagcgatgtcatgctcaccagcgaggaagaaatcaaaaccactaaccctgtggctacagaggaatacggtatcgtggcagataacttgcagcagcaaaacacggctcctcaaattggaactgtcaacagccagggggccttacccggtatggtctggcagaaccgggacgtgtacctgcagggtcccatctgggccaagattcctcacacggacggcaacttccacccgtctccgctgatgggcggctttggcctgaaacatcctccgcctcagatcctgatcaagaacacgcctgtacctgcggatcctccgaccaccttcaaccagtcaaagctgaactctttcatcacgcaatacagcaccggacaggtcagcgtggaaattgaatgggagctgcagaaggaaaacagcaagcgctggaaccccgagatccagtacacctccaactactacaaatctacaagtgtggactttgctgttaatacagaaggcgtgtactctgaaccccaccccattggcacccgttacctcacccgtcccctgtaa

SEQ ID NO: 1011 - DNA, 2211 bp, synthetic construct
  misc_feature 1..2211: note = source = /note="Description of Artificial Sequence: Synthetic polynucleotide"
  source 1..2211: mol_type = other DNA
atggctgccgatggttatcttccagattggctcgaggacaacctctctgagggcattcgcgagtggtgggcgctgaaacctggagccccgaagcccaaagccaaccagcaaaagcaggacgacggccggggtctggtgcttcctggctacaagtacctcggacccttcaacggactcgacaagggggagcccgtcaacgcggcggacgcagcggccctcgagcacgacaaggcctacgaccagcagctcaaagcgggtgacaatccgtacctgcggtataaccacgccgacgccgagtttcaggagcgtctgcaagaagatacgtcttttgggggcaacctcgggcgagcagtcttccaggccaagaagcgggttctcgaacctctcggtctggttgaggaaggcgctaagacggctcctggaaagaaacgtccggtagaacagtcgccacaagagccagactcctcctcgggcatcggcaagacaggccagcagcccgctaaaaagagactcaattttggtcagactggcgactcagagtcagtccccgatccacaacctctcggagaacctccagcaacccccgctgctgtgggacctactacaatggcttcaggcggtggcgcaccaatggcagacaataacgaaggcgccgacggagtgggtagttcctcgggaaattggcattgcgattcccaatggctgggggacagagtcatcaccaccagcacccgaacctgggccctgcccacctacaacaaccacctctacaagcaaatctccagtgcttcaacgggggccagcaacgacaaccactacttcggctacagcaccccctgggggtattttgatttcaacagattccactgccatttctcaccacgtgactggcagcgactcatcaacaacaactggggattccggcctaagcgactcaacttcaagctcttcaacattcaggtcaaagaggttacggacaacaatggagtcaagaccatcgccaataaccttaccagcacggtccaggtcttcacggactcggagtaccagttgccgtacgtcctcggctctgcgcaccaggactgcctccctccgttcccggcggacgtgttcatgattccgcagtacggctacctaacgctcaacaatggcagccaggcagtgggacggtcatccttttactgcctggaatatttcccatcgcagatgctgagaacgggcaacaactttaccttcagctacacctttgaggacgttcctttccacagcagctacgctcacagccagagtctggaccgtctcatgaatcctctgattgaccagtacctgtactacttgtctcggactcaaacaacaggaggcacggcaaatacgcagactctgggcttcagccaaggtgggcctaatacaatggccaatcaggcaaagaactggctgccaggaccctgttaccgccaacaacgcgtctcaacgacaaccggacaaaacaacaatagcaactttgcctggactgctgggaccaaataccatctgaatggaagaaattcattggctaatcctggcatcgctatggcaacacacaaagacgacaaggagcgtttttttcccagtaacgggatcctgatttttggcaaacaaaatgctgccagagacaatgcggattacagcgatgtcatgctcaccagcgaggaagaaatcaaaaccactaaccctgtggctacagaggaatacggtatcgtggcagataacttgcagcagcaaaacacggctcctcaaattggaactgtcaacagccagggggccttacccggtatggtctggcagaaccgggacgtgtacctgcagggtcccatctgggccaagattcctcacacggacggcaacttccacccgtctccgctgatgggcggctttggcctgaaacatcctccgcctcagatcctgatcaagaacacgcctgtacctgcggatcctccgaccaccttcaaccagtcaaagctgaactctttcatcacgcaatacagcaccggacaggtcagcgtggaaattgaatgggagctgcagaaggaaaacagcaagcgctggaaccccgagatccagtacacctccaactactacaaatctacaagtgtggactttgctgttaatacagaaggcgtgtactctgaaccccaccccattggcacccgttacctcacccgtcccctgtaa

SEQ ID NO: 1012 - DNA, 2211 bp, synthetic construct
  misc_feature 1..2211: note = source = /note="Description of Artificial Sequence: Synthetic polynucleotide"
  source 1..2211: mol_type = other DNA
atggctgccgatggttatcttccagattggctcgaggacaacctctctgagggcattcgcgagtggtgggacttgaaacctggagccccgaagcccaaagccaaccagcaaaagcaggacgacggccggggtctggtgcttcctggctacaagtacctcggacccttcaacggactcgacaagggggagcccgtcaacgcggcggacgcagcggccctcgagcacgacaaggcctacgaccagcagctcaaagcgggtgacaatccgtacctgcggtataaccacgccgacgccgagtttcaggagcgtctgcaagaagatacgtcttttgggggcaacctcgggcgagcagtcttccaggccaagaagcgggttctcgaacctctcggtctggttgaggaaggcgctaagacggctcctggaaagaaacgtccggtagagcagtcaccacaagagccagactcctcctcgggcatcggcaagacaggccagcagcccgctaaaaagagactcaattttggtcagactggcgactcagagtcagtccccgacccacaacctctcggagaacctccagcaacccccgctgctgtgggacctactacaatggcttcaggcggtggcgcaccaatggcagacaataacgaaggtgccgacggagtgggtaatgcctcaggaaattggcattgcgattccacatggctgggcgactgagtcatcaccaccagcacccgcacctgggccttgcccacctacaataaccacctctacaagcaaatctccagtgcttcaacgggggccagcaacgacaaccactacttcggctacagcaccccctgggggtattttgatttcaacagattccactgccacttttcaccacgtgactggcagcgactcatcaacaacaattggggattccggcccaagagactcaacttcaaactcttcaacatccaagtcaaggaggtcacgcagaatgaaggcaccaagaccatcgccaataacctcaccagcaccatccaggtgtttacggactcggagtaccagctgccgtacgttctcggctctgcccaccagggctgcctgcctccgttcccggcggacgtgttcatgattccccagtacggctacctaacgctcaacaatggcagccaggcagtgggacggtcatccttttactgcctggaatactttccttcgcagatgctgagaaccggcaacaacttccagtttacttacaccttcgaggacgtgcctttccacagcagctacgcccacagccagagcttggaccggctgatgaatcctctgattgaccagtacctgtactacttgtctcggactcaaacaacaggaggcacggcaaatacgcagactctgggcttcagccaaggtgggcctaatacaatggccaatcaggcaaagaactggctgccaggaccctgttaccgccaacaacgcgtctcaacgacaaccgggcaaaacaacaatagcaactttgcctggactgctgggaccaaataccatctgaatggaagaaattcattggctaatcctggcatcgctatggcaacacacaaagacgacaaggagcgtttttttcccagtaacgggatcctgatttttggcaaacaaaatgctgccagagacaatgcggattacagcgatgtcatactcaccagcgaggaagaaatcaaaaccactaaccctgtggctacagaggaatacggtatcgtggcagataacttgcagcagcaaaacacggctcctcaaattggaactgtcaacagccagggggccttacccggtatggtctggcagaaccgggacgtgtacctgcagggtcccatctgggccaagattcctcacacggacggcaacttccacccgtctccgctgatgggcggctttggcctgaaacatcctccgcctcagatcctgatcaagaacacgcctgtacctgcggatcctccgaccaccttcaaccagtcaaagctgaactctttcatcacgcaatacagcaccggacaggtcagcgtggaaattgaatgggagctgcagaaggaaaacagcaagcgctggaaccccgagatccagtacacctccaactactacaaatctacaagtgtggactttgctgttaatacagaaggcgtgtactctgaaccccaccccattggcacccgttacctcacccgtcccctgtaa

SEQ ID NO: 1013 - DNA, 2211 bp, synthetic construct
  misc_feature 1..2211: note = source = /note="Description of Artificial Sequence: Synthetic polynucleotide"
  source 1..2211: mol_type = other DNA
atggctgccgatggttatcttccagattggctcgaggacactctctctgaaggaataagacagtggtggaagctcaaacctggcccaccaccaccaaagcccgcagagcggcataaggacgacagcaggggtcttgtgcttcctgggtacaagtacctcggacccttcaacggactcgacaagggagagccggtcaacgaggcagacgccgcggccctcgagcacgacaaagcctacgaccggcagctcgacagcggagacaacccgtacctcaagtacaaccacgccgacgcggagtttcaggagcgccttaaagaagatacgtcttttgggggcaacctcgggcgagcagtcttccaggccaagaagagggttctcgaaccttttggtctggttgaggaaggtgctaagacggctcctggaaagaaacgtccggtagagcagtcgccacaagagccagactcctcctcgggcattggcaagacaggccagcagcccgctaaaaagagactcaattttggtcagactggcgactcagagtcagtccccgacccacaacctctcggagaacctccagcaacccccgctgctgtgggacctactacaatggcttcaggcggtggcgcaccaatggcagacaataacgaaggcgccgacggagtgggtaatgcctcaggaaattggcattgcgattccacatggctgggcgacagagtcatcaccaccagcacccgaacatgggccttgcccacctataacaaccacctctacaagcaaatctccagtacttcaacgggggccagtaacgacaaccactacttcggctacagcaccccctgggggtattttgacttcaacagattccactgccacttctcaccacgtgactggcagcgactcatcaacaacaactggggattccggcctaagcgactcaacttcaagctcttcaacattcaggtcaaagaggttacggacaacaatggagtcaagaccatcgccaataaccttaccagcacggtccaggtcttcacggactcggagtaccagttgccgtacgtcctcggctctgcgcaccagggctgcctgcctccgttcccggcggacgtgttcatgattccgcagtacggctacctaacgctcaacaatggcagccaggcagtgggacggtcatccttttactgcctggaatatttcccatcgcagatgctgagaacgggcaacaactttaccttcagctacacttttgaggacgttcctttccacagcagctacgctcacagccagagtctggaccgtctcatgaatcctctgattgaccagtacctgtactacttgtctcggactcaaacaacaggaggcacggcaaatacgcagactctgggcttcagccaaggtgggcctaatacaatggccaatcaggcaaagaactggctgccaggaccctgttaccgccaacaacgcgtctcaacgacaaccggacaaaacaacaatagcaactttgcctggactgctgggaccaaataccatctgaatggaagaaattcattggctaatcctggcatcgctatggcaacacacaaagacgacaaggagcgtttttttcccagtaacgggatcctgatttttggcaaacaaaatgctgccagagacaatgcggattacagcgatgtcatgctcaccagcgaggaagaaatcaaaaccactaaccctgtggctacagaggaatacggtatcgtggcagataacttgcagcagcaaaacacggctcctcaaattggaactgtcaacagccagggggccttacccggtatggtctggcagaaccgggacgtgtacctgcagggtcccatctgggccaagattcctcacacggacggcaacttccacccgtctccgctgatgggcggctttggcctgaaacatcctccgcctcagatcctgatcaagaacacgcctgtacctgcggatcctccgaccaccttcaaccagtcaaagctgaactctttcatcacgcaatacagcaccggacaggtcagcgtggaaattgaatgggagctgcagaaggaaaacagcaagcgctggaaccccgagatccagtacacctccaactactacaaatctacaagtgtggactttgctgttaatacagaaggcgtgtactctgaaccccaccccattggcacccgttacctcacccgtcccctgtaa

SEQ ID NO: 1014 - DNA, 2208 bp, synthetic construct
  misc_feature 1..2208: note = source = /note="Description of Artificial Sequence: Synthetic polynucleotide"
  source 1..2208: mol_type = other DNA
atggctgccgatggttatcttccagattggctcgaggacaacctctctgagggcattcgcgagtggtgggacttgaaacctggagccccgaagcccaaagccaaccagcaaaagcaggacgacggccggggtctggtgcttcctggctacaagtacctcggacccttcaacggactcgacaagggggagcccgtcaacgcggcggatgcagcggccctcgagcacgacaaggcctacgaccggcagctcgacagcggagacaacccgtacctgcggtataaccacgccgacgcggagtttcaggagcgccttaaagaagatacgtcttttgggggcaacctcgggcgagcagtcttccaggccaagaagagggttctcgaaccttttggtctggttgaggaaggtgctaagacggctcctggaaagaaacgtccggtagagcagtcgccacaagagccagactcctcctcgggcattggcaagacaggccagcagcccgctaaaaagagactcaattttggtcagactggcgactcagagtcagtccccgacccacaacctctcggagaacctccagcaacccccgctgctgtgggacctactacaatggcttcaggcggtggcgcaccaatggcagacaataacgaaggcgccgacggagtgggtaatgcctcaggaaattggcattgcgattccacatggctgggcgacagagtcatcaccaccagcacccgcacctgggccttgcccacctacaataaccacctctacaagcaaatctccagtgcttcaacgggggccagcaacgacaaccactacttcggctacagcaccccctgggggtattttgactttaacagattccactgccacttttcaccacgtgactggcaaagactcatcaacaacaactggggattccggcccaagagactcaacttcaagctcttcaacatccaggtcaaggaggtcacgcagaatgaaggcaccaagaccatcgccaataaccttaccagcacgattcaggtctttacggactcggaataccagctcccgtacgtcctcggctctgcgcaccagggctgcctccctccgttcccggcggacgtgttcatgattccgcagtacggctacctaacactcaacaacggtagtcaggccgtgggacgctcctccttctactgcctggaatactttccttcgcagatgctgagaaccggcaacaacttccagtttacttacaccttcgaggacgtgcctttccacagcagctacgcccacagccagagcttggaccggctgatgaatcctctgattgaccagtacctgtactacttgtctcggactcaaacaacaggaggcacggcaaatacgcagactctgggcttcagccaaggtgggcctaatacaatggccaatcaggcaaagaactggctgccaggaccctgttaccgccaacaacgcgtctcaacgacaaccgggcaaaacaacaatagcaactttgcctggactgctgggaccaaataccatctgaatggaagaaattcactggctaatcctggcatcgctatggcaacacacaaagacgacaggagcgtttttttccagtaccgggatcctgattttggcaaacaaaatgctgccagagacaatgcggattacagcgatgtcatgctcaccagcgaggaagaaatcaaaaccactaaccctgtggctacagaggaatacggtatcgtggcagataacttgcagcagcaaaacacggctcctcaaattggaactgtcaacagccagggggccttacccggtatggtctggcagaaccgggacgtgtacctgcagggtcccatctgggccaagattcctcacacggacggcaacttccacccgtctccgctgatgggcggctttggcctgaaacatcctccgcctcagatcctgatcaagaacacgcctgtacctgcggatcctccgaccaccttcaaccagtcaaagctgaactctttcatcacgcaatacagcaccggacaggtcagcgtggaaattgaatgggagctgcagaaggaaaacagcaagcgctggaaccccgagatccagtacacctccaactactacaaatctacaagtgtggactttgctgttaatacagaaggcgtgtactctgaaccccaccccattggcacccgttacctcacccgtcccctgtaa

SEQ ID NO: 1015 - DNA, 2211 bp, synthetic construct
  misc_feature 1..2211: note = source = /note="Description of Artificial Sequence: Synthetic polynucleotide"
  source 1..2211: mol_type = other DNA
atggctgccgatggttatcttccagattggctcgaggacaacctctctgagggcattcgcgagtggtgggcgctgaaacctggagccccgaagcccaaagccaaccagcaaaagcaggacgacggccggggtctggtgcttcctggctacaagtacctcggacccttcaacggactcgacaagggggagcccgtcaacgcggcggatgcagcagccctcgaacacgacaaagcttacgaccagcagctcaaggccggtgacaacccctacctcaagtataaccacgccgacgccgagtttcaggagcgtcttcaaggagatacgtcttttgggggcaacctcggacgagcagtcttccaggccaagaagcgggttctcgaacctcttggtctggttgaggaagcggctaagacggctcctggaaagaagaggcctgtagagcagtctcctcaggaaccggactcctccgcgggtattggcaaatcgggtgcacagcccgctaaaaagagactcaatttcggtcagactggcgacacagagtcagtcccagaccctcaacctctcggagaacctccagcagcgccctctggtgtgggacctaatacaatggctgcaggcggtggcgcaccaatggcagacaataacgaaggtgccgatggagtgggtagttcctcgggaaattggcattgcgattcccaatggctgggggacagagtcatcaccaccagcacccgaacctgggccctgcccacctacaacaaccacctctacaagcaaatctccagtgcttcaacgggggccagcaacgacaaccactacttcggctacagcaccccttgggggtattttgacttcaacagattccactgccacttttcaccacgtgactggcagcgactcatcaacaacaactggggattccggcctaagcgactcaacttcaagctcttcaacattcaggtcaaagaggttacggacaacaatggagtcaagaccatcgccaataaccttaccagcacggtccaggtcttcacggactcagactatcagctcccgtacgtgctcgggtcggctcacgagggctgcctccctccgttcccggcggacgtgttcatgattccgcagtacggctacctaacgctcaacaatggcagccaggcagtgggacggtcatccttttactgcctggaatactttccttcgcagatgctgagaaccggcaacaacttccagtttacttacaccttcgaggacgtgcctttccacagcagctacgctcacagccagagtctggaccgtctcatgaatcctctgattgaccagtacctgtactacttgtctcggactcaaacaacaggaggcacggcaaatacgcagactctgggcttcagccaaggtgggcctaatacaatggccaatcaggcaaagaactggctgccaggaccctgttaccgccaacaacgcgtctcaacgacaaccgggcaaaacaacaatagcaactttgcctggactgctgggaccaaataccatctgaatggaagaaattcattggctaatcctggcatcgctatggcaacacacaaagacgacaaggagcgtttttttcccagtaacgggatcctgatttttggcaaacaaaatgctgccagagacaatgcggattacagcgatgtcatgctcaccagcgaggaagaaatcaaaaccactaaccctgtggctacagaggaatacggtatcgtagcagataacttgcagcagcaaaacacggctcctcaaattggaactgtcaacagccagggggccttacccggtatggtctggcagaaccgggacgtgtacctgcagggtcccatctgggccaagattcctcacacggacggcaacttccacccgtctccgctgatgggcggctttggcctgaaacatcctccgcctcagatcctgatcaagaacacgcctgtacctgcggatcctccgaccaccttcaaccagtcaaagctgaactctttcatcacgcaatacagcaccggacaggtcagcgtggaaattgaatgggagctgcagaaggaaaacagcaagcgctggaaccccgagatccagtacacctccaactactacaaatctacaagtgtggactttgctgttaatacagaaggcgtgtactctgaaccccaccccattggcacccgttacctcacccgtcccctgtaa

SEQ ID NO: 1016 - DNA, 2211 bp, synthetic construct
  misc_feature 1..2211: note = source = /note="Description of Artificial Sequence: Synthetic polynucleotide"
  source 1..2211: mol_type = other DNA
atggctgccgatggttatcttccagattggctcgaggacactctctctgaaggaataagacagtggtggaagctcaaacctggcccaccaccaccaaagcccgcagagcggcataaggacgacagcaggggtcttgtgcttcctgggtacaagtacctcggacccttcaacggactcgacaagggagagccggtcaacgaggcagacgccgcggccctcgagcacgacaaagcctacgaccggcagctcgacagcggagacaacccgtacctcaagtacaaccacgccgacgcggagtttcaggagcgccttaaagaagatacgtcttttgggggcaacctcgggcgagcagtcttccaggccaagaagagggttctcgaaccttttggtctggttgaggaagcggctaagacggctcctggaaagaaacgtccggtagagcagtcgccacaagagccagactcctcctcgggcattggcaagacaggccagcagcccgctaaaaagagactcaattttggtcagactggcgactcagagtcagtccccgacccacaacctctcggagaacctccagcaacccccgctgctgtgggacctactacaatggcttcaggcggtggcgcaccaatggcagacaataacgaaggcgccgacggagtgggtaatgcctcaggaaattggcattgcgattccacatggctgggcgacagagtcatcaccaccagcacccgaacatgggccttgcccacctataacaaccacctctacaagcaaatctccagtgcttcaacgggggccagcaacgacaaccactacttcggctacagcaccccctgggggtattttgacttcaacagattccactgccacttctcaccacgtgactggcagcgactcatcaacaacaactggggattccggcctaagcgactcaacttcaagctcttcaacattcaggtcaaagaggttacggacaacaatggagtcaagaccatcgccaataaccttaccagcacggtccaggtcttcacggactcagactatcagctcccgtacgtgctcgggtcggctcacgagggctgcctcccgccgttcccagcggacgttttcatgattcctcagtacggctacctaacactcaacaacggtagtcaggccgtgggacgctcctccttctactgcctggaatactttccttcgcagatgctgagaacgggcaacaactttaccttcagctacacctttgaggacgttcctttccacagcagctacgctcacagccagagtctggaccgtctcatgaatcctctgattgaccagtacctgtactacttgtctcggactcaaacaacaggaggcacggcaaatacgcagactctgggcttcagccaaggtgggcctaatacaatggccaatcaggcaaagaactggctgccaggaccctgttaccgccaacaacgcgtctcaacgacaaccgggcaaaacaacaatagcaactttgcctggactgctgggacaaaataccatctgaatggaagaaattcattggctaatcctggcatcgctatggcaacacacaaagacgacaaggagcgtttttttcccagtaacgggattctgatttttggcaaacaaaatgctgccagagacaatgcggattacagcgatgtcatgctcaccagcgaggaagaaatcaaaaccactaaccctgtggctacagaggaatacggtatcgtggcagataacttgcagcagcaaaacacggctcctcaaattggaactgtcaacagccagggggccttacccggtatggtctggcagaaccgggacgtgtacctgcagggtcccatctgggccaagattcctcacacggacggcaacttccacccgtctccgctgatgggcggctttggacttaagcacccgcctcctcagatcctcatcaaaaacacgcctgttcctgcggatcctccgaccaccttcaaccagtcaaagctgaactctttcatcacgcaatacagcaccggacaggtcagcgtggaaattgaatgggagctgcagaaggaaaacagcaagcgctggaaccccgagatccagtacacctccaactactacaaatctacaagtgtggactttgctgttaatacagaaggcgtgtactctgaaccccaccccattggcacccgttacctcacccgtcccctgtaa

SEQ ID NO: 1017 - DNA, 2211 bp, synthetic construct
  misc_feature 1..2211: note = source = /note="Description of Artificial Sequence: Synthetic polynucleotide"
  source 1..2211: mol_type = other DNA
atggctgccgatggttatcttccagattggctcgaggacaacctctctgagggcattcgcgagtggtgggcgctgaaacctggagccccgaagcccaaagccaaccagcaaaagcaggacgacggccggggtctggtgcttcctggctacaagtacctcggacccttcaacggactcgacaaaggagagccggtcaacgcggcggacgcagcggccctcgagcacgacaaggcctacgaccagcagctcaaagcgggtgacaatccgtacctgcggtataaccacgccgacgccgagtttcaggagcgtctgcaagaagatacgtcttttgggggcaacctcgggcgagcagtcttccaggccaagaagcgggttctcgaacctctcggtctggttgaggaaggcgctaagacggctcctggaaagaaacgtccggtagagcagtcgccacaagagccagactcctcctcgggcatcggcaagacaggccagcagcccgctaaaaagagactcaattttggtcagactggcgactcagagtcagtccccgacccacaacctctcggagaacctccagcaacccccgctgctgtgggacctactacaatggcttcaggcggtggcgcaccaatggcagacaataacgaaggcgccgacggagtgggtagttcctcgggaaattggcattgcgattccacatggctgggcgacagagtcatcaccaccagcacccgcacctgggccttgcccacctacaataaccacctctacaagcaaatctccagtgcttcaacgggggccagcaacgacaaccactacttcggctacagcaccccctgggggtattttgacttcaacagattccactgccacttctcaccacgtgactggcagcgactcatcaacaacaactggggattccggcctaagcgactcaacttcaagctcttcaacattcaggtcaaagaggttacggacaacaatggagtcaagaccatcgccaataaccttaccagcacggtccaggtcttcacggactcggagtaccagttgccgtacgtcctcggctctgcgcaccagggctgcctccctccgttcccggcggacgtgttcatgattccgcagtacggctacctaacgctcaacaatggcagccaggcagtgggacggtcatccttttactgcctggaatatttcccatcgcagatgctgagaacgggcaacaactttaccttcagctacacctttgaggacgttcctttccacagcagctacgctcacagccagagtctggaccgtctcatgaatcctctgattgaccagtacctgtactacttgtctcggactcaaacaacaggaggcacggcaaatacgcagactctgggcttcagccaaggtgggcctaatacaatggccaatcaggcaaagaactggctgccaggaccctgttaccgccaacaacgcgtctcaacgacaaccgggcaaaacaacaatagcaactttgcctggactgctgggaccaaataccatctgaatggaagaaattcattggctaatcctggcatcgctatggcaacacacaaagacgacaaggagcgtttttttcccagtaacgggatcctgatttttggcaaacaaaatgctgccagagacaatgcggattacagcgatgtcatgctcaccagcgaggaagaaatcaaaaccactaaccctgtggctacagaggaatacggtatcgtggcagataacttgcagcagcaaaacacggctcctcaaattggaactgtcaacagccagggggccttacccggtatggtctggcagaaccgggatgtgtacctgcagggtcccatctgggccaagattcctcacacggacggcaacttccacccgtctccgctgatgggcggctttggcctgaaacatcctccgcctcagatcctgatcaagaacacgcctgtacctgcggatcctccgaccaccttcaaccagtcaaagctgaactctttcatcacgcaatacagcaccggacaggtcagcgtggaaattgaatgggagctgcagaaggaaaacagcaagcgctggaaccccgagatccagtacacctccaactactacaaatctacaagtgtggactttgctgttaatacagaaggcgtgtactctgaaccccaccccattggcacccgttacctcacccgtcccctgtaa

SEQ ID NO: 1018 - DNA, 2214 bp, synthetic construct
  misc_feature 1..2214: note = source = /note="Description of Artificial Sequence: Synthetic polynucleotide"
  source 1..2214: mol_type = other DNA
atggctgccgatggttatcttccagattggctcgaggacaaccttagtgaaggaattcgcgagtggtgggcgctgaaacctggagccccgaagcccaaagccaaccagcaaaagcaggacgacggccggggtctggtgcttcctggctacaagtacctcggacccttcaacggactcgacaagggggagcccgtcaacgcggcggacgcagcggccctcgagcacgacaaggcctacgaccagcagctcaaagcgggtgacaatccgtacctgcggtataaccacgccgacgccgagtttcaggagcgtctgcaagaagatacgtcttttgggggcaacctcgggcgagcagtcttccaggccaagaagcgggttctcgaacctctcggtctggttgaggaaggcgctaagacggctcctggaaagaaacgtccggtagagcagtcgccacaagagccagactcctcctcgggcatcggcaagacaggccagcagcccgctaaaaagagactcaatttcggtcagactggcgacacagagtcagtcccagaccctcaaccaatcggagaacctcccgcagccccctcaggtgtgggatctcttacaatggcttcaggtggtggcgcaccagtggcagacaataacgaaggtgccgatggagtgggtagttcctcgggaaattggcattgcgattcccaatggctgggggacagagtcatcaccaccagcaccagaacctgggccttgcccacctacaataaccacctctacaagcaaatctccaacagcacatctggaggatcttcaaatgacaacgcctacttcggctacagcaccccctgggggtattttgactttaacagattccactgccacttttcaccacgtgactggcagcgactcatcaacaacaactggggattccgacccaagagactcaacttcaagctcttcaacatccaggtcaaggaggtcacgcagaacgaaggcaccaagaccatcgccaataacctcaccagcaccatccaggtgtttacggactcggagtaccagctgccgtacgttctcggctccgcccaccagggctgcctgcctccgttcccggcggacgtgttcatgattccccagtacggctacctaacgctcaacaacggtagtcaggccgtgggacgctcctccttctactgcctggaatactttccttcgcagatgctgagaaccggcaacaacttccagtttacttacaccttcgaggacgtgcctttccacagcagctacgcgcacagccagagcttggaccggctgatgaatcctctgattgaccagtacctgtactacttgtctcggactcaaacaacaggaggcacggcaaatacgcagactctgggcttcagccaaggtgggcctaatacaatggccaatcaggcaaagaactggctgccaggaccctgttaccgccaacaacgcgtctcaacgacaaccgggcaaaacaacaatagcaactttgcctggactgctgggaccaaataccatctgaatggaagaaattcattggctaatcctggcatcgctatggcaacacacaaagacgacaaggagcgtttttttcccagtaacgggatcctgatttttggcaaacaaaatgctgccagagacaatgcggattacagcgatgtcatgctcaccagcgaggaagaaatcaaaaccactaaccctgtggctacagaggaatacggtatcgtggcagataacttgcagcagcaaaacacggctcctcaaattggaactgtcaacagccagggggccttacccggtatggtctggcagaaccgggacgtgtacctgcagggtcccatctgggccaagattcctcacacggacggcaacttccacccgtctccgctgatgggcggctttggcctgaaacatcctccgcctcagatcctgatcaagaacacgcctgtacctgcggatcctccgaccaccttcaaccagtcaaagctgaactctttcatcacgcaatacagcaccggacaggtcagcgtggaaattgaatgggagctgcagaaggaaaacagcaagcgctggaaccccgagatccagtacacctccaactactacaaatctacaagtgtggactttgctgttaatacagaaggcgtgtactctgaaccccaccccattggcactcgttacctcacccgtcccctgtaa

SEQ ID NO: 1019 - DNA, 2211 bp, synthetic construct
  misc_feature 1..2211: note = source = /note="Description of Artificial Sequence: Synthetic polynucleotide"
  source 1..2211: mol_type = other DNA
atggctgccgatggttatcttccagattggctcgaggacaacctctctgagggcattcgcgagtggtgggcgctgaaacctggagccccgaagcccaaagccaaccagcaaaagcaggacgacggccggggtctggtgcttcctggctacaagtacctcggacccttcaacggactcgacaagggggagcccgtcaacgcggcggatgcagcagccctcgaacacgacaaagcttacgaccagcagctcaaggccggtgacaacccctacctcaagtataaccacgccgacgccgagtttcaggagcgtcttcaaggagatacgtcttttgggggcaacctcggacgagcagtcttccaggccaagaagcgggttctcgaacctcttggtctggttgaggaagcggctaagacggctcctggaaagaagaggcctgtagagcagtctcctcaggaaccggactcctccgcgggtattggcaaatcgggtgcacagcccgctaaaaagagactcaatttcggtcagactggcgacacagagtcagtcccagaccctcaacctctcggagaacctccagcagcgccctctggtgtgggacctaatacaatggctgcaggcggtggcgcaccaatggcagacaataacgaaggtgccgatggagtgggtagttcctcgggaaattggcattgcgattcccaatggctgggggacagagtcatcaccaccagcacccgaacctgggccctgcccacctacaacaaccacctctacaagcaaatctccagtgcttcaacgggggccagcaacgacaaccactacttcggctacagcaccccttgggggtattttgacttcaacagattccactgccacttctcaccacgtgactggcagcgactcatcaacaacaactggggattccggcctaagcgactcaacttcaagctcttcaacattcaggtcaaagaggttacggacaacaatggagtcaagaccatcgccaataaccttaccagcacggtccaggtcttcacggactcggagtaccagttgccgtacgtcctcggctctgcgcaccagggctgcctccctccgttcccggcggacgtgttcatgattccgcagtacggctacctaacgctcaacaatggcagccaggcagtgggacggtcatccttttactgcctggaatatttcccatcgcagatgctgagaacgggcaacaactttaccttcagctacacctttgaggacgttcctttccacagcagctacgctcacagccagagtctggaccgtctcatgaatcctctgattgaccagtacctgtactacttgtctcggactcaaacaacaggaggcacggcaaatacgcagactctgggcttcagccaaggtgggcctaatacaatggccaatcaggcaaagaactggctgccaggaccctgttaccgccaacaacgcgtctcaacgacaaccgggcaaaacaacaatagcaactttgcctggactgctgggaccaaataccatctgaatggaagaaattcattggctaatcctggcatcgctatggcaacacacaaagacgacaaggagcgtttttttcccagtaacgggatcctgatttttgacaaacaaaatgctgccagagacaatgcggattacagcgatgtcatgctcaccagcgaggaagaaatcaaaaccactaaccctgtggctacagaggaatacggtatcgtggcagataacttgcagcagcaaaacacggctcctcaaattggaactgtcaacagccagggggccttacccggtatggtctggcagaaccgggatgtgtacctgcagggtcccatctgggccaagattcctcacacggacggcaacttccacccgtctccgctgatgggcggctttggcctgaaacatcctccgcctcagatcctgatcaagaacacgcctgtacctgcggatcctccgaccaccttcaaccagtcaaagctgaactctttcatcacgcaatacagcaccggacaggtcagcgtggaaattgaatgggagctgcagaaggaaaacagcaagcgctggaaccccgagatccagtacacctccaactactacaaatctacaagtgtggactttgctgttaatacagaaggcgtgtactctgaaccccaccccattggcacccgttacctcacccgtcccctgtaa

SEQ ID NO: 1020 - DNA, 2211 bp, synthetic construct
  misc_feature 1..2211: note = source = /note="Description of Artificial Sequence: Synthetic polynucleotide"
  source 1..2211: mol_type = other DNA
atggctgccgatggttatcttccagattggctcgaggacactctctctgaaggaataagacagtggtggaagctcaaacctggcccaccaccaccaaagcccgcagagcggcataaggacgacagcaggggtcttgtgcttcctgggtacaagtacctcggacccttcaacggactcgacaagggagagccggtcaacgaggcagacgccgcggccctcgagcacgacaaagcctacgaccggcagctcgacagcggagacaacccgtacctcaagtacaaccacgccgacgcggagtttcaggagcgccttaaagaagatacgtcttttgggggcaacctcggacgagcagtcttccaggcgaaaaagagggttcttgaacctctgggcctggttgaggaacctgttaagacggctccgggaaaaaagaggccggtagagcactctcctgtggagccagactcctcctcgggaaccggaaaggcgggccagcagcctgcaagaaaaagattgaattttggtcagactggcgactcagagtcagtccccgacccacaacctctcggagaacctccagcaacccccgctgctgtgggacctaatacgatggctacaggcagtggcgcaccaatggcagacaataacgagggcgccgacggagtgggtaattcctcgggaaattggcattgcgattccacatggatgggcgacagagtcatcaccaccagcaccagaacctgggccctgcccacttacaacaaccatctctacaagcaaatctccagtgcttcaacgggggccagcaacgacaaccactacttcggctacagcaccccctgggggtattttgacttcaacagattccactgccacttctcaccacgtgactggcagcgactcatcaacaacaactggggattccggcctaagcgactcaacttcaagctcttcaacattcaggtcaaagaggttacggacaacaatggagtcaagaccatcgccaataaccttaccagcaccatccaggtctttacggactcggaataccagctgccgtacgttctcggctctgcccaccagggctgcctgcctccgttcccggcggacgtgttcatgattccccagtacggctacctaacactcaacaacggtagtcaggccgtgggacgctcctccttctactgcctggaatatttcccatcgcagatgctgagaacgggcaacaactttaccttcagctacacctttgaggacgttcctttccacagcagctacgctcacagccagagtctggaccgtctcatgaatcctctgattgaccagtacctgtactacttgtctcggactcaaacaacaggaggcaaggcaaatacgcagactctgggcttcagccaaggtgggcctaatacaatggccaatcaggcaaagaactggctgccaggaccctgttaccgccaacaacgcgtctcaacgacaaccgggcaaaacaacaatagcaactttgcctggactgctgggaccaaataccatctgaatggaagaaattcattggctaatcctggcatcgctatggcaacacacaaagacgacaaggagcgtttttttcccagtaacgggatcctgatttttggcaaacaaaatgctgccagagacaatgcggattacagcgatgtcatgctcaccagcgaggaagaaatcaaaaccactaaccctgtggctacagaggaatacggtatcgtggcagataacttgcagcagcaaaacacggctcctcaaattggaactgtcaacagccagggggccttacccggtatggtctggcagaaccgggacgtgtacctgcagggtcccatctgggccaagattcctcacacggacggcaacttccacccgtctccgctgatgggcggctttggcctgaaacatcctccgcctcagatcctgatcaagaacacgcctgtacctgcggatcctccgaccaccttcaaccagtcaaagctgaactctttcatcacgcaatacagcaccggacaggtcagcgtggaaattgaatgggagctgcagaaggaaaacagcaagcgctggaaccccgagatccagtacacctccaactactacaaatctacaagtgtggactttgctgttaatacagaaggcgtgtactctgaaccccaccccattggcacccgttacctcacccgtcccctgtaa

SEQ ID NO: 1021 - DNA, 2211 bp, synthetic construct
  misc_feature 1..2211: note = source = /note="Description of Artificial Sequence: Synthetic polynucleotide"
  source 1..2211: mol_type = other DNA
atggctgccgatggttatcttccagattggctcgaggacaacctctctgagggcattcgcgagtggtgggcgctgaaacctggagccccgaagcccaaagccaaccagcaaaagcaggacgacggccggggtctggtgcttcctggctacaagtacctcggacccttcaacggactcgacaagggggagcccgtcaacgcggcggacgcagcggccctcgagcacgacaaggcctacgaccagcagctcaaagcgggtgacaatccgtacctgcggtataaccacgccgacgccgagtttcaggagcgtctgcaagaagatacgtcttttgggggcaacctcgggcgagcagtcttccaggccaagaagcgggttctcgaaccttttggtctggttgaggaaggtgctaagacggctcctggaaagaaacgtccggtagagcagtcgccacaagagccagactcctcctcgggcatcggcaagacaggccagcagcccgctaaaaagagactcaattttggtcagactggcgactcagagtcagtccccgacccacaacctctcggagaacctccagcaacccccgctgctgtgggacctactacaatggcttcaggcggtggcgcaccaatggcggacaataacgaaggcgccgacggagtgggtaatgcctcaggaaattggcattgcgattccacatggctgggcgacagagtcatcaccaccagcacccgcacctgggccttgcccacctacaataaccacctctacaagcaaatctccagtgcttcaacgggggccagcaacgacaaccactacttcggctacagcaccccctgggggtattttgacttcaacagattccactgccacttttcaccacgtgactggcaaagactcatcaacaacaactggggattccggcctaagcgactcaacttcaagctcttcaacattcaggtcaaagaggttacggacaacaatggagtcaagaccatcgccaataaccttaccagcacggtccaggtcttcacggactcggagtaccagttgccgtacgtcctcggctctgcgcaccagggctgcctccctccgttcccggcggacgtgttcatgattccgcagtacggctacctaacgctcaacaatggcagccaggcagtgggacggtcatccttttactgcctggaatatttcccatcgcagatgctgagaacgggcaacaactttaccttcagctacacctttgaggacgttcctttccacagcagctacgctcacagccagagtctggaccgtctcatgaatcctctgattgaccagtacctgtactacttgtctcggactcaaacaacaggaggcacgggaaatacgcagactctgggcttcagccaaggtgggcctaatacaatggccaatcaggcaaagaactggctgccaggaccctgttaccgccaacaacgcgtctcaacgacaaccgggcaaaacaacaatagcaactttgcctggactgctgggaccaaataccatctgaatggaagaaattcattggctaatcctggcatcgctatggcaacacacaaagacgacaaggagcgtttttttcccagtaacgggatcctgatttttggcaaacaaaatgctgccagagacaatgcggattacagcgatgtcatgctcaccagcgaggaagaaatcaaaaccactaaccctgtggctacagaggaatacggtatcgtggcagataacttgcagcagcaaaacacggctcctcaaattggaactgtcaacagccagggggccttacccggtatggtctggcagaaccgggacgtgtacctgcagggtcccatctgggccaagattcctcacacggacggcaacttccacccgtctccgctgatgggcggctttggcctgaaacatcctccgcctcagatcctgatcaagaacacgcctgtacctgcggatcctccgaccaccttcaaccagtcaaagctgaactctttcatcacgcaatacagcaccggacaggtcagcgtggaaattgaatgggagctgcagaaggaaaacagcaagcgctggaaccccgagatccagtacacctccaactactacaaatctacaagtgtggactttgctgttaatacagaaggcgtgtactctgaaccccaccccattggcacccgttacctcacccgtcccctgtaa

SEQ ID NO: 1022 - DNA, 2211 bp, synthetic construct
  misc_feature 1..2211: note = source = /note="Description of Artificial Sequence: Synthetic polynucleotide"
  source 1..2211: mol_type = other DNA
atggctgccgatggttatcttccagattggctcgaggacaacctctctgagggcattcgcgagtggtgggacttgaaacctggagccccgaaacccaaagccaaccagcaaaagcaggacgacggccggggtctggtgcttcctggctacaagtacctcggacccttcaacggactcgacaagggggagcccgtcaacgcggcggacgcagcggccctcgagcacgacaaggcctacgaccagcagctcaaagcgggtgacaatccgtacctgcggtataaccacgccgacgccgagtttcaggagcgtctgcaagaagatacgtcttttgggggcaacctcgggcgagcagtcttccaggccaagaagcgggttctcgaacctctcggtctggttgaggaaggcgctaagacggctcctggaaagaagaggcctgtagagcagtcgccacaagagccagactcctcctcgggcatcggcaagacaggccagcagcccgctaaaaagagactcaattttggtcagactggcgactcagagtcagtccccgatccacaacctctcggagaacctccagcaacccccgctgctgtgggacctactacaatggcttcaggcggtggcgcaccaatggcagacaataacgaaggcgccgacggagtgggtagttcctcgggaaattggcattgcgattccacatggctgggcgacagagtcatcaccaccagcacccgaacatgggccttgcccacctataacaaccacctctacaagcaaatctccagtgcttcaacgggggccagcaacgacaaccactacttcggctacagcaccccctgggggtattttgacttcaacagattccactgccacttctcaccacgtgactggcagcgactcatcaacaacaactggggattccggcctaagcgactcaacttcaagctcttcaacatccaggtcaaggaggtcacgcagaatgaaggcaccaagaccatcgccaataacctcaccagcaccatccaggtgtttacggactcggagtaccagcttccgtacgtcctcggctctgcgcaccagggctgcctccctccgttcccggcggacgtgttcatgattccgcagtacggctacctaacgctcaacaatggcagccaggcagtgggacggtcatccttttactgcctggaatatttcccatcgcagatgctgagaacgggcaacaactttaccttcagctacacctttgaggacgttcctttccacagcagctacgcgcacagccagagcttggaccggctgatgaatcctctgattgaccagtacctgtactacttgtctcggactcaaacaacaggaggcacggcaaatacgcagactctgggcttcagccaaggtgggcctaatacaatggccaatcaggcaaagaactggctgccaggaccctgttaccgccaacaacgcgtctcaacgacaaccgggcaaaacaacaatagcaactttgcctggactgctgggaccaaataccatctgaatggaagaaattcattggctaatcctggcatcgctatggcaacacacaaagacgacaaggagcgtttttttcccagtaacgggatcctgatttttggcaaacaaaatgctgccagagacaatgcggattacagcgatgtcatgctcaccagcgaggaagaaatcaaaaccactaaccctgtggctacagaggaatacggtatcgtggcagataacttgcagcagcaaaacacggctcctcaaattggaactgtcaacagccagggggccttacccggtatggtctggcagaaccgggacgtgtacctgcagggtcccatctgggccaagattcctcacacggacggcaacttccacccgtctccgctgatgggcggctttggcctgaaacatcctccgcctcagatcctgatcaagaacacgcctgtacctgcggatcctccgaccaccttcaaccagtcaaagctgaactctttcatcacgcaatacagcaccggacaggtcagcgtggaaattgaatgggagctgcagaaggaaaacagcaagcgctggaaccccgagatccagtacacctccaactactacaaatctacaagtgtggactttgctgttaatacagaaggcgtgtactctgaaccccaccccattggcacccgttacctcacccgtcccctgtaa

SEQ ID NO: 1023 - DNA, 2211 bp, synthetic construct
  misc_feature 1..2211: note = source = /note="Description of Artificial Sequence: Synthetic polynucleotide"
  source 1..2211: mol_type = other DNA
atggctgccgatggttatcttccagattggctcgaggacaacctctctgagggcattcgcgagtggtgggcgctgaaacctggagccccgaagcccaaagccaaccagcaaaagcaggacgacggccggggtctggtgcttcctggctacaagtacctcggacccttcaacggactcgacaagggggagcccgtcaacgcggcggatgcagcggccctcgagcacgacaaggcctacgaccagcagctcaaagcgggtgacaatccgtacctgcggtataaccacgccgacgccgagtttcaggagcgtctgcaagaagatacgtcttttgggggcaacctcgggcgagcagtcttccaggccaagaagcgggttctcgaacctctcggtctggttgaggaaggcgctaagacggctcctggaaagaaacgtccggtagagcagtcgccacaagagccagactcctcctcgggcatcggcaagacaggccagcagcccgctaaaaagagactcaattttggtcagactggcgactcagagtcagtccccgacccacaacctctcggagaacctccagcaacccccgctgctgtgggacctactacaatggctgcaggcggtggcgcaccaatggcagacaataacgaaggcgccgacggagtgggtagttcctcgggaaattggcattgcgattccacatggatgggcgacagagtcatcaccaccagcacccgaacctgggccttgcccacctataacaaccatctctacaagcaaatctccagtgcttcaacgggggccagcaacgacaaccactacttcggctacagcaccccctgggggtattttgacttcaacagattccactgccacttctcaccacgtgactggcagcgactcatcaacaacaactggggattccggcccaagagactcagcttcaagctcttcaacatccaggtcaaggaggtcacgcagaatgaaggcaccaagaccatcgccaataacctcaccagcaccatccaggtgtttacggactcggagtaccagctgccgtacgtcctcggctctgcgcaccagggctgcctccctccgttcccggcggacgtgttcatgattccgcagtacggctacctaacgctcaacaatggcagccaggcagtgggacggtcatccttttactgcctggaatatttcccatcgcagatgctgagaacgggcaacaactttaccttcagctacacctttgaggacgttcctttccacagcagctacgctcacagccagagcttggaccggctgatgaatcctctgattgaccagtacctgtactacttgtctcggactcaaacaacaggaggcacggcaaatacgcagactctgggtttcagccaaggtgggcctaatacaatggccaatcaggcaaagaactggctgcaaggaccctgttaccgccaacaacgcgtctcaacgacaaccgggcaaaacaacaatagcaactttgcctggactgctgggaccaaataccatctgaatggaagaaattcattggctaatcctggcatcgctatggcaacacacaaagacgacaaggagcgtttttttcccagtaacgggatcctgatttttggcaaacaaaatgctgccagagacaatgcggattacagcgatgtcatgctcaccagcgaggaagaaatcaaaaccactaaccctgtggctacagaggaatacggtatcgtggcagataacttgcagcagcaaaacacggctcctcaaattggaactgtcaacagccagggggccttacccggtatggtctggcagaacctggacgtgtacctgcagggtcccatctgggccaagattcctcacacggacggcaacttccacccgtctccgctgatgggcggctttggcctgaaacatcctccgcctcagatcctgatcaagaacacgcctgtacctgcggatcctccgaccaccttcaaccagtcaaagctgaactctttcatcacgcaatacagcaccggacaggtcagcgtggaaattgaatgggagctgcagaaggaaaacagcaagcgctggaaccccgagatccagtacacctccaactactacaaatctacaagtgtggactttgctgttaatacagaaggcgtgtactctgaaccccaccccattggcacccgttacctcacccgtcccctgtaa

SEQ ID NO: 1024 - DNA, 2214 bp, synthetic construct
  misc_feature 1..2214: note = source = /note="Description of Artificial Sequence: Synthetic polynucleotide"
  source 1..2214: mol_type = other DNA
atggctgccgatggttatcttccagattggctcgaggacaacctctctgagggcattcgcgagtggtgggcgctgaaacctggagccccgaagcccaaagccaaccagcaaaagcaggacgacggccggggtctggtgcttcctggctacaagtacctcggacccttcaacggactcgacaagggagagcccgtcaacgcggcggacgcagcggccctcgagcacgacaaggcctacgaccagcagctcaaagcgggtgacaatccgtacctgcggtataaccacgccgacgccgagtttcaggagcgtctgcaagaagatacgtcttttgggggcaacctcgggcgagcagtcttccaggccaagaagcgggttctcgaacctctcggtctggttgaggaaggcgctaagacggctcctggaaagaagagaccggtagagccatcaccccagcgttctccagactcctcctcgggcatcggcaagacaggccagcagcccgctaaaaagagactcaattttggtcagactggcgactcagagtcagtccccgacccacaacctctcggagaacctccagcaacccccgctgctgtgggacctactacaatggcttcaggtggtggcgcaccaatggcagacaataacgaaggcgccgacggagtgggtaatgcctcaggaaattggcattgcgattcccaatggctgggcgacagagtcatcaccaccagcacccgaacatgggccttgcccacctataacaaccacctctacaagcaaatctccagtgcttcaacgggggccagcaacgacaaccactacttcggctacagcaccccctgggggtattttgacttcaacagattccactgccacttttcaccacgtgactggcagcgactcatcaacaacaactggggattccggcctaagcgactcaacttcaagctcttcaacattcaggtcaaagaggttacggacaacaatggagtcaagaccatcgccaataaccttaccagcacggtccaggtcttcacggactcagactatcagctcccgtacgtgctcgggtcggctcacgagggctgcctcccgccgttcccagcggacgttttcatgattccccagtacggctacctaacactcaacaacggtagtcaggccgtgggacgctcctccttctactgcctggaatactttccttcgcagatgctgagaaccggcaacaacttccagtttacttacaccttcgaggacgtgcctttccacagcagctacgctcacagccagagcttggaccggctgatgaatcctctgattgaccagtacctgtactacttgtctcggactcaaacaacaggaggcacggcaaatacgcagactttgggcttcagccaaggtgggcctaatacaatggccaatcaggcaaagaactgggtgccaggaccctgttaccgccaacaacgggtttcaacggcaaccgggcaaaacaacaatagcaactttgcctggactgctgggaccaaataccatctgaaaggaagaaattcattggctaatcctggcatcgctatggcaacacacaaagacgacaaggagcgtttttttcccagtaacgggatcctgatttttggcaaacaaaatgctgccagagacaatgcggattacagcgatgtcatgctcaccagcgaggaagaaatcaaaaccactaaccctgtggctacagaggaatacggtatcgtggcagataacttgcagcagcaaaacacggctcctcaaattggaactgtcaacagccagggggccttacccggtatggtctggcagaaccgggacgtgtacctgcagggtcccatctgggccaagattcctcacacggacggcaacttccacccgtctccgctgatgggcggctttggcctgaaacatcctccgcctcagatcctgatcaagaacacgcctgtacctgcggatcctccgaccaccttcaaccagtcaaagctgaactctttcatcacgcaatacagcaccggacaggtcagcgtggaaattgaatgggagctgcagaaggaaaacagcaaacgctggaacccagagattcaatacacttccaactactacaaatctacaagtgtggactttgctgttaatacagaaggcgtgtactctgaaccccaccccattggcacccgttacctcacccgtcccctgtaa

SEQ ID NO: 1025 - DNA, 2214 bp, synthetic construct
  misc_difference 676: note = modified_base - a, c, t, or g
  misc_difference 697: note = modified_base - a, c, t, or g
  misc_difference 715: note = modified_base - a, c, t, or g
  misc_difference 748: note = modified_base - a, c, t, or g
  misc_difference 750: note = modified_base - a, c, t, or g
  misc_difference 757: note = modified_base - a, c, t, or g
  misc_difference 763: note = modified_base - a, c, t, or g
  misc_feature 1..2214: note = source = /note="Description of Artificial Sequence: Synthetic polynucleotide"
  source 1..2214: mol_type = other DNA
atggctgccgatggttatcttccagattggctcgaggacactctctctgaaggaataagacagtggtggaagctcaaacctggcccaccaccaccaaagcccgcagagcggcataaggacgacagcaggggtcttgtgcttcctgggtacaagtacctcggacccttcaacggactcgacaagggagagccggtcaacgaggcagacgccgcggccctcgagcacgacaaagcctacgaccggcagctcgacagcggagacaacccgtacctcaagtacaaccacgccgacgcggagtttcaggagcgccttaaagaagatacgtcttttgggggcaacctcggacgagcagtcttccaggcgaaaaagagggttcttgaacctctcggtctggttgaggaaggcgctaagacggctcctggaaagaaacgtccggtagagcagtcgccacaagagccagactcctcctcgggcatcggcaagacaggccagcagcccgctaaaaagagactcaattttggtcagactggcgactcagagtcagtccccgacccacaacctctcggagaacctccagcaacgccctctggtgtgggacctaatacaatggctgcaggcggtggcgctccaatggcagacaataacgaaggcgccgacggagtgggtagttcctcangaaattggcattgcgattccncatggctgggcgacagantcatcaccaccagcacccgaacctgggccctgncnacctacnacaacnacctctacaagcaaatctccaacagcacatctggaggagccaccaacgacaacacctacttcggctacagcaccccctgggggtattttgactttaacagattccactgccacttttcaccacgtgactggcagcgactcatcaacaacaactggggattccggcctaagcgactcaacttcaagctcttcaacatccaggtcaaggaggtcacgcagaatgaaggcaccaagaccatcgccaataacctcaccagcaccatccaggtgtttacggactcggagtaccagctgccgtacgttctcggctctgcccaccagggctgcctgcctccgttcccggcggacgtgttcatgattccccagtacggctacctaacactcaacaacggtagtcaggccgtgggacgctcctccttctactgcctggaatactttccttcgcagatgctgagaaccggcaacaacttccagtttacttacaccttcgaggacgtgcctttccacagcagctacgcccacagccagagcttggaccggctgatgaatcctctgattgaccagtacctgtactacttgtctcggactcaaacaacaggaggcacggcaaatacgcagactctgggcttcagccaaggtgggcctaatacaatggccaatcaggcaaagaactggctgccaggaccctgttaccgccaacaacgcgtctcaacgacaaccgggcaaaacaacaatagcaactttgcctggactgctgggaccaaataccatctgaatggaagaaattcattggctaatcctggcatcgctatggcaacacacaaagacgacaaggagcgtttttttcccagtaacgggatcctgatttttggcaaacaaaatgctgccagagacaatgcggattacagcgatgtcatgctcaccagcgaggaagaaatcaaaaccactaaccctgtggctacagaggaatacggtatcgtggcagataacttgcagcagcaaaacacggctcctcaaattggaactgtcaacagccagggggccttacccggtatggtttggcagaaccgggacgtgtacctgcagggtcctatctgggccaagattcctcacacggacggaaactttcatccctcgccgctgatgggaggctttggactgaaacacccgcctcctcagatcctgattaagaatacacctgttcccgcggatcctccaactaccttcagtcaagctaagctggcgtcgttcatcacgcaatacagcacaggacaagtgagtgtggaaattgaatgggagctgcagaaagaaaacagcaagcgctggaatcccgaagtgcagtacacatccaattatgcaaaatctgccaacgttgattttactgtggacaacaatggactttatactgagcctcgccccattggcacccgttaccttacccgtcccctgtaa

SEQ ID NO: 1026 - DNA, 2214 bp, synthetic construct
  misc_feature 1..2214: note = source = /note="Description of Artificial Sequence: Synthetic polynucleotide"
  source 1..2214: mol_type = other DNA
atggctgccgatggttatcttccagattggctcgaggacaacctctctgagggcattcgcgagtggtgggacttgaaacctggagccccgaagcccaaagccaaccagcaaaagcaggacgacggccggggtctggtgcttcctggctacaagtacctcggacccttcaacggactcgacaagggggagcccgtcaacgcggcggacgcagcggccctcgagcacgacaaggcctacgaccagcagctcaaagcgggtgacaatccgtacctgcggtataaccacgccgacgccgagtttcaggagcgtctgcaagaagatacgtcttttgggggcaacctcgggcgagcagtcttccaggccaagaagcgggttctcgaacctctcggtctggttgaggaaggcgctaagacggctcctggaaagaagagaccggtagagccatcaccccagcgttctccagactcctctacgggcatcggcaagaaaggccagcagcccgcgaaaaagagactcaactttgggcagactggcgactcagagtcagtgcccgaccctcaaccaatcggagaaccccccgcaggcccctctggtgtgggatctcttacaatggcttcaggtggtggcgcaccagtggcagacaataacgaaggtgccgatggagtgggtagttcctcgggaaattggcattgcgattcccaatggctgggggacagagtcatcaccaccagcacccgaacatgggccttgcccacctataacaaccacctctacaagcaaatctccagtgcttcaacgggggccagcaacgacaaccactacttcggctacagcaccccctgggggtattttgactttaacagattccactgccacttctcaccacgtgactggcagcgactcatcaacaacaactggggattccggcccaagagactcaacttcaagctcttcaacatccaggtcaaggaggtcacggacaatgatggagtcaagaccatcgccaataaccttaccagcacgattcaggtctttacggactcggaataccagttgccgtacgtcctcggctctgcgcaccagggctgcctgcctccgttcccggcggacgtgttcatgattccgcagtacggctacctaacgctcaacaatggcagccaggcagtgggacggtcatccttttactgcctggaatatttcccatcgcagatgctgagaacgggcaacaactttaccttcagctacacttttgaggacgttcctttccacagcagctacgctcacagccagagtctggaccgtctcatgaatcctctgattgaccagtacctgtactacttgtctcggactcaaacaacaggaggcacggcaaatacgcagactctgggcttcagccaaggtgggcctaatacaatggccaatcacgcaaagaactggctgccaggaccctgttaccgccaacaacgcgtctcaacgacaaccggacaaaacaacaatagcaactttgcctggactgctgggaccaaataccatctgaatggaagaaattcattggctaatcctggcatcgctatggcaacacacaaagacgacaaggagcgtttttttcccagtaacgggatcctgatttttggcaaacaaaatgctgccagagacaatgcggattacagcgatgtcatgctcaccagcgaggaagaaatcaaaaccactaaccctgtggctacagaggaatacggtatcgtggcagataacttgcagcagcaaaacacggctcctcaaattggaactgtcaacagccagggggccttacccggtatggtctggcagaaccgggacgtgtacctgcagggtcccatctgggccaagattcctcacacggacggcaacttccacccgtctccgctgatgggcggctttggcctgaaacatcctccgcctcagatcctgatcaagaacacgcctgtacctgcggatcctccgaccaccttcaaccagtcaaagctgaactctttcatcacgcaatacagcaccggacaggtcagcgtggaaattgaatgggagctgcagaaggaaaacagcaagcgctggaaccccgagatccagtacacctccaactactacaaatctacaagtgtggactttgctgttaatacagaaggcgtgtactctgaaccccaccccattggcacccgttacctcacccgtcccctgtaa

SEQ ID NO: 1027 - DNA, 2211 bp, synthetic construct
  misc_feature 1..2211: note = source = /note="Description of Artificial Sequence: Synthetic polynucleotide"
  source 1..2211: mol_type = other DNA
atggctgccgatggttatcttccagattggctcgaggacactctctctgaaggaataagacagtggtggaagctcaaacctggcccaccaccaccaaagcccgcagagcggcacaaggacgacagcaggggtcttgtgcttcctgggtacaagtacctcggacccttcaacggactcgacaagggagagccggtcaacgaggcagacgccgcggccctcgagcacgacaaagcctacgaccggcagctcgacagcggagacaacccgtacctcaagtacaaccacgccgacgcggagtttcaggagcgccttaaagaagatacgtcttttgggggcaacctcggacgagcagtcttccaggcgaaaaagagggttcttgaacctctgggcctggttgaggaacctgttaagacggctccgggaaaaaagaggccggtagagcactctcctgtggagccagactcctcctcgggaaccggaaaggcgggccagcagcctgctaaaaagagactcaattttggtcagactggcgactcagagtcagtccccgacccacaacctctcggagaacctccagcaacccccgctgctgtgggacctactacaatggcttcaggtggtggcgcaccaatggcagacaataacgaaggcgccgacggagtgggtaatgcctcaggaaattggcattgcgattccacatggctgggcgacagagtcatcaccaccagcacccgcacctgggccttgcccacctacaataaccacctctacaagcaaatctccagtgcttcaacgggggccagcaacgacaaccactacttcggctacagcaccccctgggggtattttgacttcaacagattccactgccacttctcaccacgtgactggcagcgactcatcaacaacaactggggattccggcccaagagactcaacttcaaactcttcaacatccaagtcaaggaggtcacgcagaatgaaggcaccaagaccatcgccaataacctcaccagcaccatccaggtgtttacggactcggagtaccagctgccgtacgttctcggctctgcccaccagggctgcctgcctccgttcccggcggacgtgttcatgattccccagtacggctacctaacactcaacaacggtagtcaggccgtgggacgctcctccttctactgcctggaatactttccttcgcagatgctgagaaccggcaacaacttccagtttacttacaccttcgaggacgtgcctttccacagcagctacgcgcacagccagagcttggaccggctgatgaatcctctgattgaccagtacctgtactacttgtctcggactcaaacaacaggaggcacggcaaatacgcagactctgggcttcagccaaggtgggcctaatacaatggccaatcaggcaaagaactggctgccaggaccctgttaccgccaacaacgcgtctcaacgacaaccgggcaaaacaacaatagcaactttgcctggactgctgggaccaaataccatctgaatggaagaaattcattggctaatcctggcatcgctatggcaacacacaaagacgacaaggagcgtttttttcccagtaacgggatcctgatttttggcaaacaaaatgctgccagagacaatgcggattacagcgatgtcatgctcaccagcgaggaagaaatcaaaaccactaaccctgtggctacagaggaatacggtatcgtggcagataacttgcagcagcaaaacacggctcctcaaattggaactgtcaacagccagggggccttacccggtatggtctggcagaaccgggacgtgtacctgcagggtcccatctgggccaagattcctcacacggacggcaacttccacccgtctccgctgatgggcggctttggcctgaaacatcctccgcctcagatcctgatcaagaacacgcctgtacctgcggatcctccgaccaccttcaaccagtcaaagctgaactctttcatcacgcaatacagcaccggacaggtcagcgtggaaattgaatgggagctgcagaaggaaaacagcaagcgctggaaccccgagatccagtacacctccaactactacaaatctacaagtgtggactttgctgttaatacagaaggcgtgtactctgaaccccaccccattggcacccgttacctcacccgtcccctgtaa

SEQ ID NO: 1028 - DNA, 2211 bp, synthetic construct
  misc_feature 1..2211: note = source = /note="Description of Artificial Sequence: Synthetic polynucleotide"
  source 1..2211: mol_type = other DNA
atggctgccgatggttatcttccagattggctcgaggacaacctctctgagggcattcgcgagtggtgggcgctgaaacctggagccccgaagcccaaagccaaccagcaaaagcaggacgacggccggggtctggtgcttcctggctacaagtacctcggacccttcaacggactcgacaagggggagcccgtcaacgcggcggatgcagcggccctcgagcacgacaaggcctacgaccagcagctccaagcgggtgacaatccgtacctgcggtataaccacgccgacgccgagtttcaggagcgtcttcaaggagatacgtcttttgggggcaacctcggacgagcagtcttccaggccaagaagcgggttctcgaacctctcggtctggttgaggaaggcgctaagacggctcctggaaagaaacgtccggtagagcagtcgccacaagagccagactcctcctcgggcatcggcaagacaggccagcagcccgctaaaaagagactcaattttggtcagactggcgactcagagtcagtccccgacccacaacctctcggagaacctccagcaacccccgctgctgtgggacctactacaatggcttcaggcggtggcgcaccaatggcggacaataacgaaggcgccgatggagtgggtaatgcctcaggaaattggcattgcgattccacatggctgggcgacagagtcatcaccaccagcacccgcacctgggccttgcccacctacaataaccacctctacaagcaaatctccagtgcttcaacgggggccagcaacgacaaccactacttcggctacagcaccccctgggggtattttgacttcaacagattccactgccacttctcaccacgtgactggcagcgactcatcaacaacaactggggattccggcctaagcgactcaacttcaagctcttcaacattcaggtcaaagaggttacggacaacaatggagtcaagaccatcgccaataacctcaccagcaccatccaggtgtttacggactcggagtaccagctgccgtacgttctcggctctgcccaccagggctgcctgcctccgttcccggcggacgtgttcatgattccccagtacggctacctaacactcaacaacggtagtcaggccgtgggacgctcctccttctactgcctggaatactttccttcgcagatgctgagaaccggcaacaacttccagtttacttacaccttcgaggacgtgcctttccacagcagctacgcccacagccagagcttggaccggctgatgaatcctctgattgaccagtacctgtactacttgtctcggactcaaacaacaggaggcacggcaaatacgcagactctgggcttcagccaaggtgggcctaatacaatggccaatcaggcaaagaactggctgccaggaccctgttaccgccaacaacgcgtctcaacgacaaccgggcaaaacaacaatagcaactttgcctggactgctgggaccaaataccatctgaatggaagaaattcattggctaatcctggcatcgctatggcaacacacaaagacgacaaggagcgtttttttcccagtaacgggatcctgatttttggcaaacaaaatgctgccagagacaatgcggattacagcgatgtcatgctcaccagcgaggaagaaatcaaaaccactaaccctgtggctacagaggaatacggtatcgtggcagataacttgcagcagcaaaacacggctcctcaaattggaactgtcaacagccagggggccttacccggtatggtctggcagaaccgggacgtgtacctgcagggtcccatctgggccaagattcctcacacggacggcaacttccacccgtctccgctgatgggcggctttggcctgaaacatcctccgcctcagatcctgatcaagaacacgcctgtacctgcggatcctccgaccaccttcaaccagtcaaagctgaactctttcatcacgcaatacagcaccggacaggtcagcgtggaaattgaatgggagctgcagaaggaaaacagcaagcgctggaaccccgagatccagtacacctccaactactacaaatctacaagtgtggactttgctgttaatacagaaggcgtgtactctgaaccccaccccattggcacccgttacctcacccgtcccctgtaa

SEQ ID NO: 1029 - DNA, 2217 bp, synthetic construct
  misc_feature 1..2217: note = source = /note="Description of Artificial Sequence: Synthetic polynucleotide"
  source 1..2217: mol_type = other DNA
atggctgccgatggttatcttccagattggctcgaggacactctctctgaaggaataagacagtggtggaagctcaaacctggcccaccaccaccaaagcccgcagagcggcataaggacgacagcaggggtcttgtgcttcctgggtacaagtacctcggacccttcaacggactcgacaagggggagcccgtcaacgcggcggatgcagcggccctcgagcacgacaaggcctacgaccagcagctcaaagcgggtgacaatccgtacctgcggtataaccacgccgacgcggagtttcaggagcgccttaaagaagatacgtcttttgggggcaacctcggacgagcagtcttccaggcgaaaaagagggttcttgaacctctcggtctggttgaggaaggcgctaagacggctcctggaaagaagagaccggtagagccatcaccccagcgttctccagactcctctacgggcatcggcaagaaaggccaacagcccgccagaaaaagactcaattttggtcagactggcgactcagagtcagttccagaccctcaacctctcggagaacctccagcagcgccctctggtgtgggacctaatacaatggctgcaggcggtggcgcaccaatggcagacaataacgaaggcgccgacggagtgggtagttcctcgggaaattggcattgcgattcccaatggctgggggacagagtcatcaccaccagcaccagaacctgggccctgcccacctacaacaatcacctctacaagcaaatctccaacagcacatctggaggatcttcaaatgacaacgcctacttcggctacagcaccccctgggggtattttgacttcaaccgcttccactgccacttctcaccacgtgactggcagcgactcatcaacaacaactggggattccggcccaagagactcaacttcaagctcttcaacattcaggtcaaagaggttacggacaacaatggagtcaagaccatcgccaataaccttaccagcacggtccaggtctttacggactcggagtaccagttgccgtacgtcctcggctctgcgcaccagggctgcctccctccgttcccggcggacgtgttcatgattccccagtacggctacctaacactcaacaacggtagtcaggccgtgggacgctcctccttctactgcctggaatatttcccttctcagatgctgagaacgggcaacaactttaccttcagctacacctttgaggacgttcctttccacagcagctacgctcacagccagagtctggaccgtctcatgaatcctctgattgaccagtacctgtactacttgtctcggactcaaacaacaggaggcacggcaaatacgcagactctgggcttcagccaaggtgggcctaatacaatggccaatcaggcaaagaactggctgccaggaccctgttaccgccaacaacgcgtctcaacgacaaccgggcaaaacaacaatagcaactttgcctggactgctgggaccaaataccatctgaatggaagaaattcattggctaatcctggcatcgctatggcaacacacaaagacgacaaggagcgtttttttcccagtaacgggatcctgatttttggcaaacaaaatgctgccagagacaatgcggattacagcgatgtcatgctcaccagcgaggaagaaatcaaaaccactaaccctgtggctacagaggaatacggtatcgtggcagataacttgcagcagcaaaacacggctcctcaaattggaactgtcaacagccagggggccttacccggtatggtctggcagaaccgggacgtgtacctgcagggtcccatctgggcaaagattccacacacggacggacattttcacccctctcccctcatgggtggattcggacttaaacaccctcctccacagattctcatcaagaacaccccggtacctgcgaatcctccgaccaccttcaaccagtcaaagctgaactctttcatcacgcaatacagcacaggacaagtgagtgtggaaattgaatgggagctgcagaaagaaaacagcaagcgctggaatcccgaagtgcagtacacatccaattatgcaaaatctgccaacgttgattttactgtggacaacaatggactttatactgagcctcgccccattggcacccgttaccttacccgtcccctgtaa

SEQ ID NO: 1030 - DNA, 2211 bp, synthetic construct
  misc_feature 1..2211: note = source = /note="Description of Artificial Sequence: Synthetic polynucleotide"
  source 1..2211: mol_type = other DNA
atggctgccgatggttatcttccagattggctcgaggacaacctctctgagggcattcgcgagtggtgggcgctgaaacctggagccccgaaacccaaagccaaccagcaaaagcaggacgacggccggggtctggtgcttcctggctacaagtacctcggacccttcaacggactcgacaagggggagcccgtcaacgcggcggacgcagcggccctcgagcacgacaaggcctacgaccagcagctcaaggcgggtgacaatccgtacctgcggtataaccacgccgacgccgagtttcaggagcgtctgcaagaagatacgtcttttgggggcaacctcgggcgagcagtcttccaggccaaaaagaggcttcttgaacctcttggtctggttgaggaaggggctaagacggctcctggaaagaaacgtccggtagagcagtcgccacaagagccagactcctcctcgggcattggcaagacaggccagcagcccgctaaaaagagactcaactttgggcagactggcgactcagagtcagtgcccgatcctcaacctctcggagaacctccagcaacccccgctgctgtgggacctactacaatggcttcaggcggtggcgcaccaatggcggacaataacgaaggcgccgatggagtgggtaattcctcgggaaattggcattgcgattccacatggatgggcgacagagtcatcaccaccagcacccgaacctgggccctgcccacctacaacaatcacctctacaagcaaatctccagtgcttcaacgggggccagcaacgacaaccactacttcggctacagcaccccctgggggtattttgatttcaacagattccactgccatttttcaccacgtgactggcagcgactcatcaacaacaactggggattccggcccaagagactcaacttcaagctcttcaacatccaggtcaaggaggtcacgcagaatgaaggcaccaagaccatcgccaataaccttaccagcacgattcaggtctttacggattcggaataccagctcccgtacgtcctcggctctgcgcaccagggctgcctccctccgttcccggcggacgtgttcattattccgcagtacggctacctaacgctcaacaatggtagccaggcagtgggacggtcatccttttactgcctggaatatttcccatcgcagatgctgagaacgggcaacaactttaccttcagctacacctttgaggacgttcctttccacagcagctacgctcacagccagagtctggaccgtctcatgaatcctctgattgaccagtacctgtactacttgtctcggactcaaacaacaggaggcacggcaaatacgcagactctgggcttcagccaaggtgggcctaatacaatggccaatcaggcaaagaactggctgccaggaccctgttaccgccaacaacgcgtctcaacgacaaccgggcaaaacaacaatagcaactttgcctggactgctgggaccaaataccatctgaatggaagaaattcattggctaatcctggcatcgctatggcaacacacaaagacgacaaggagcgtttttttcccagtaacgggatcctgatttttggcaaacaaaatgctgccagagacaatgcggattacagcgatgtcatgctcaccagcgaggaagaaatcaaaaccactaaccctgtggctacagaggaatacggtatcgtggcagataacttgcagcagcaaaacacggctcctcaaattggaactgtcaacagccagggggccttacccggtatggtctggcagaaccgggacgtgtacctgcagggtcccatctgggccaagattcctcacacggacggcaacttccacccgtctccgctgatgggcggctttggcctgaaacatcctccgcctcagatcctgatcaagaacacgccagtacctgcggatcctccgaccaccttcaaccagtcaaagctgaactctttcatcacgcaatacagcaccggacaggtcagcgtggaaattgaatgggagctgcagaaggaaaacagcaagcgctggaaccccgagatccagtacacctccaactactacaaatctacaagtgtggactttgctgttaatacagaaggcgtgtactctgaaccccaccccattggcacccgttacctcacccgtcccctgtaa

SEQ ID NO: 1031 - DNA, 2211 bp, synthetic construct
  misc_feature 1..2211: note = source = /note="Description of Artificial Sequence: Synthetic polynucleotide"
  source 1..2211: mol_type = other DNA
atggctgccgatggttatcttccagattggctcgaggacaacctctctgagggcattcgcgagtggtgggcgctgaaacctggagccccgaaacccaaagccaaccagcaaaagcaggacgacggccggggtctggtgcttcctggctacaagtacctcggacccttcaacggactcgacaagggggagcccgtcaacgcggcggatgcagcggccctcgagcacgacaaggcctacgaccagcagctcaaggcgggtgacaatccgtacctgcggtataaccacgccgacgccgagtttcaggagcgtctgcaagaagatacgtcttttgggggcaacctcgggcgagcagtcttccaggccaaaaagagggttcttgaaccttttggtctggttgaggaagctgctaagacggctcctggaaagaaacgtccggtagagcagtcgccacaagagccagactcctcctcgggcattggcaagacaggccagcagcccgctaaaaagagactcaattttggtcagactggcgactcagagtcagtgcccgaccctcaacctctcggagaacctccagcaacccccgctgctgtgggacctactacaatggcttcaggcggtggcgcaccaatggcagacaataacgaaggcgccgatggagtgggtaatgcctcaggaaattggcattgcgattccacatggctgggcgacagagtcatcaccaccagcacccgaacctgggccctgcccacctacaacaatcacctctacaagcaaatctccagtgcttcaacgggggccagcaacgacaaccactacttcggctacagcaccccctgggggtattttgactttaacagattccactgccacttttcaccacgtgactggcagcgactcatcaacaacaactggggattccggcccaagagactcaacttcaagctcttcaacatccaggtcaaggaggtcacgcagaatgaaggcaccaagaccatcgccaataacctcaccagcaccattcaggtctttacggattcggaataccagctcccgtacgtcctcggctctgcccaccagggctgcctccctccgttcccggcggacgtgttcatgattccgcagtacggctacctaacgctcaacaatggtagccaggcagtgggacggtcatccttttactgcctggaatatttcccatcgcagatgctgagaacgggcaacaactttaccttcagctacacctttgaggacgttcctttccacagcagctacgctcacagccagagtctggaccgtctcatgaatcctctgattgaccagtacctgtactacttgtctcggactcaaacaacaggaggcacggcaaatacgcagactctgggcttcagccaaggtgggcctaatacaatggccaatcacgcaaagaactggctgccaggaccctgttaccgccaacaacgcgtctcaacgacaaccgggcaaaacaacaatagcaactttgcctggactgctgggaccaaataccatctgaatggaagaaattcattggctaatcctggcatcgctatggcaacacacaaagacgacaaggagcgtttttttcccagtaacgggatcctgatttttggcaaacaaaatgctgccagagacaatgcggattacagcgatgtcatgctcaccagcgaggaagaaatcaaaaccactaaccctgtggctacagaggaatacggtatcgtggcagataacttgcagcagcaaaacacggctcctcaaattggaactgtcaacagccagggggccttacccggtatggtctggcagaaccgggacgtgtacctgcagggtcccatctgggccaagattcctcacacggacggcaacttccacccgtctccgctgatgggcggctttggcctgaaacatcctccgcctcagatcctgatcaagaacacgcctgtacctgcggatcctccgaccaccttcaaccagtcaaagctgaactctttcatcacgcaatacagcaccggacaggtcagcgtggaaattgaatgggagctgcagaaggaaaacagcaagcgctggaaccccgagatccagtacacctccaactactacaaatctacaagtgtggactttgctgttaatacagaaggcgtgtactctgaaccccaccccattggcacccgttacctcacccgtcccctgtaa

SEQ ID NO: 1032 - DNA, 2211 bp, synthetic construct
  misc_feature 1..2211: note = source = /note="Description of Artificial Sequence: Synthetic polynucleotide"
  source 1..2211: mol_type = other DNA
atggctgccgatggttatcttccagattggctcgaggacaacctctctgagggcattcgcgagtggtgggcgctgaaacctggagccccgaagcccaaagccaaccagcaaaagcaggacgacggccggggtctggtgcttcctggctacaagtacctcggacccttcaacggactcgacaaaggagagcccgtcaacgaggcggacgcggcggccctcgaacacgacaaggcttacgaccagcagctcaaggccggtgacaacccctacctgcggtacaaccacgccgacgccgagttccaggagcggctgcaagaagatacgtcttttgggggcaacctcgggcgagcagtcttccaggccaagaagaggcttcttgaacctcttggtctggttgaggaagcggctaagacggctcctggaaagaagaggcctgtagagcagtctcctcaggaaccggactcctccgcgggtattggcaaatcaggtgcacagcccgctaaaaagagactcaattttggtcagactggcgactcagagtcagtccccgacccacaacctctcggagaacctccagcaacccccgctgctgtgggacctactacaatggcttcaggcggtggcgcaccaatggcagacaataacgaaggcgccgatggagtgggtaatgcctcaggaaattggcattgcgattccacatggctgggcgacagagtcatcaccaccagcacccgaacctgggccctgcccacctataacaaccatctctacaagcaaatctccagtgcttcaacgggggccagtaacgacaaccactacttcggctacagcaccccctgggggtattttgactttaacagattccactgccacttctcaccacgtgactggcagcgactcatcaacaacaactggggattccggcccaagcgactcaacttcaagctcttcaacattcaggtcaaagaggttacggacaacgatggagtcaagaccatcgccaataaccttaccagcaccattcaggtgtttacggactcggaataccagctgccgtacgttctcggctccgcccaccagggctgcctgcctccgttcccggcggacgtgttcatgattccccagtacggctacctaacactcaacaacggtagtcaggccgtgggacgctcctccttctactgcctggaatactttccttcgcagatgctgagaactggcaacaacttccagtttacttacaccttcgaggacgtgcctttccacagcagctacgcccacagccagagcttggaccggctgatgaatcctctgattgaccagtacctgtactacttgtctcggactcaaacaacaggaggcacggcaaatacgcagactctgggcttcagccaaggtgggcctaatacaatggccaatcaggcaaagaactggctgccaggaccctgttaccgccaacaacgcgtctcaacgacaaccgggcaaaacaacaatagcaactttgcctggactgctgggaccaaataccatctgaatggaagaaattcattggctaatcctggcatcgctatggcaacacacaaagacgacaaggagcgtttttttcccagtaacgggatcctgatttttggcaaacaaaatgctgccagagacaatgcggattacagcgatgtcatgctcaccagcgaggaagaaatcaaaaccactaaccctgtggctacagaggaatacggtatcgtggcagataacttgcagcagcaaaacacggctcctcaaattggaactgtcaacagccagggggccttacccggtatggtctggcagaaccgggacgtgtacctgcagggtcccatctgggccaagattcctcacacggacggcaacttccacccgtctccgctgatgggcggctttggcctgaaacatcctccgcctcagatcctgatcaagaacacgcctgtacctgcggatcctccgaccaccttcaaccagtcaaagctgaactctttcatcacgcaatacagcaccggacaggtcagcgtggaaattgaatgggagctgcagaaggaaaacagcaagcgctggaaccccgagatccagtacacctccaactactacaaatctacaagtgtggactttgctgttaatacagaaggcgtgtactctgaaccccaccccattggcacccgttacctcacccgtcccctgtaa

SEQ ID NO: 1033 - DNA, 2211 bp, synthetic construct
  misc_feature 1..2211: note = source = /note="Description of Artificial Sequence: Synthetic polynucleotide"
  source 1..2211: mol_type = other DNA
atggctgccgatggttatcttccagattggctcgaggacaacctctctgagggcattcgcgagtggtgggcgctgaaacctggagccccgaagcccaaagccaaccagcaaaagcaggacgacggccggggtctggtgcttcctggctacaagtacctcggacccttcaacggactcgacaagggggagcccgtcaacgcggcggatgcagcggccctcgagcacgacaaagcctacgaccagcagctcaaagcgggtgacaatccgtacctgcggtataaccacgccgacgccgagtttcaggagcgtctgcaagaagatacgtcttttgggggcaacctcgggcgagcagtcttccaggccaagaagagggttctcgaacctttgggtctggttgaggaaggggctaagacggctcctggaaagaaaaggccggtagagcagtctcctcaggaaccggactcctccgcgggtattggcaagacaggtgcacagcccgctaaaaagagactcaattttggtcagactggcgactcagagtcagtccccgacccacaacctctcggagaacctccagcaacccccgctgctgtgggacctactacaatggcttcaggcggtggcgcaccaatggcagacaataacgaaggcgccgacggagtgggtagtgcctcgggaaattggcattgcgattccacatggctgggcgacagagtcatcaccaccagcacccgaacctgggccctgcccacctataacaaccatctctacaagcaaatctccagtgcttcaacgggggccagtaacgacaaccactacttcggctacagcaccccctgggggtattttgacttcaacagattccactgccacttctcaccacgtgactggcagcgactcatcaacaacaactggggattccggcccaagcgactcaacttcaagctcttcaacattcaggtcaaagaggttacggacaacaatggagtcaagaccatcgccaataaccttaccagcacgatccaggtctttacggactcggagtaccagctgccgtacgtcctcggctctgcgcaccagggctgcctgcctccgttcccggcggacgtgttcatgattccgcagtacggctacctaacgctcaacaatggtagccaggcagtgggacggtcatccttttactgcctggaatatttcccatcgcagatgctgagaacgggcaacaactttaccttcagctacacctttgaggacgttcctttccacagcagctacgctcacagccagagtctggaccgtctcatgaatcctctgattgaccagtacctgtactacttgtctcggactcaaacaacaggaggcacggcaaatacgcagactctgggcttcagccaaggtgggcctaatacaatggccaatcaggcaaagaactggctgccaggaccctgttaccgccaacaacgcgtctcaacgacaaccgggcaaaacaacaatagcaactttgcctggactgctgggaccaaataccatctgaatggaagaaattcattggctaatcctggcatcgctatggcaacacacaaagacgacaaggagcgtttttttcccagtaacgggatcctgatttttggcaaacaaaatgctgccagagacaatgcggattacagcgatgtcatgctcaccagcgaggaagaaatcaaaaccactaaccctgtggctacagaggaatacggtatcgtggcagataacttgcagcagcaaaacacggctcctcaaattggaactgtcaacagccagggggccttacccggtatggtctggcagaaccgggacgtgtacctgcagggtcccatctgggccaagattcctcacacggacggcaacttccacccgtctccgctgatgggcggctttggcctgaaacatcctccgcctcagatcctgatcaagaacacgcctgtacctgcggatcctccgaccaccttcaaccagtcaaagctgaactctttcatcacgcaatacagcaccggacaggtcagcgtggaaattgaatgggagctgcagaaggaaaacagcaagcgctggaaccccgagatccagtacacctccaactactacaaatctacaagtgtggactttgctgttaatacagaaggcgtgtactctgaaccccaccccattggcacccgttacctcacccgtcccctgtaa

SEQ ID NO: 1034 - DNA, 2211 bp, synthetic construct
  misc_feature 1..2211: note = source = /note="Description of Artificial Sequence: Synthetic polynucleotide"
  source 1..2211: mol_type = other DNA
atggctgccgatggttatcttccagattggctcgaggacaacctctctgagggcattcgcgagtggtgggacttgaaacctggagccccgaagcccaaagccaaccagcaaaagcaggacgacggccggggtctggtgcttcctggctacaagtacctcggacccttcaacggactcgacaagggggagcccgtcaacgcggcggacgcagcggccctcgagcacgacaaggcctacgaccagcagctcaaagcgggtgacaatccgtacctgcggtataaccacgccgacgccgagtttcaggagcgtctgcaagaagatacgtcttttgggggcaacctcggacgagcagtcttccaggccaaaaagaggcttcttgaacctcttggtctggttgaggaagcggctaagacggctcctggaaagaagaggcctgtagagcagtctcctcaggaaccggactcctccgcgggtattggcaaatcgggtgcacagcccgctaaaaagagactcaatttcggtcagactggcgacacagagtcagtcccagaccctcaaccaatcggagaacctccagcagcgccctctggtgtgggacctaatacaatggctgcaggcggtggcgcaccaatggcagacaataacgaaggtgccgatggagtgggtagttcctcgggaaattggcattgcgattcccaatggctgggggacagagtcatcaccaccagcacccgaacctgggccctgcccacctataacaaccacctctacaagcaaatctccagtgcttcaacgggggccagcaacgacaaccactactttggctacagcaccccttgggggtattttgacttcaacagattccactgccacttttcaccacgtgactggcaaagactcatcaacaacaactggggattccgacccaagagactcaacttcaagctcttcaacatccaggtcaaggaggtcacgcagaatgaaggcaccaagaccatcgccaataacctcaccagcaccatccaggtgtttacggactcggagtaccagctgccgtacgttctcggctctgcccaccagggctgcctgcctccgttcccggcggacgtgttcatgattccccagtacggctacctaacactcaacaacggtagtcaggccgtgggacgctcctccttctactgcctggaatactttccttcgcagatgctgagaaccggcaacaacttccagtttacttacaccttcgaggacgtgcctttccacagcagctacgcgcacagccagagcttggaccggctgatgaatcctctgattgaccagtacctgtactacttgtctcggactcaaacaacaggaggcacggcaaatacgcagactctgggcttcagccaaggtgggcctaatacaatggccaatcacgcaaagaactggctgccaggaccctgttaccgccaacaacgcgtctcaacgacaaccgggcaaaacaacaatagcaactttgcctggactgctgggaccaaataccatctgaatggaagaaattcattggctaatcctggcatcgctatggcaacacacaaagacgacaaggagcgtttttttcccagtaacgggatcctgatttttggcaaacaaaatgctgccagagacaatgcggattacagcgatgtcatgctcaccagcgaggaagaaatcaaaaccactaaccctgtggctacagaggaatacggtatcgtggcagataacttgcagcagcaaaacacggctcctcaaattggaactgtcaacagccagggggccttacccggtatggtctggcagaaccgggacgtgtacctgcagggtcccatctgggccaagattcctcacacggacggcaacttccacccgtctccgctgatgggcggctttggcctgaaacatcctccgcctcagatcctgatcaagaacacgcctgtacctgcggatcctccgaccaccttcaaccagtcaaagctgaactctttcatcacgcaatacagcaccggacaggtcagcgtggaaattgaatgggagctgcagaaggaaaacagcaagcgctggaaccccgagatccagtacacctccaactactacaaatctacaagtgtggactttgctgttaatacagaaggcgtgtactctgaaccccaccccattggcacccgttacctcacccgtcccctgtaa

SEQ ID NO: 1035 - DNA, 2214 bp, synthetic construct
  misc_feature 1..2214: note = source = /note="Description of Artificial Sequence: Synthetic polynucleotide"
  source 1..2214: mol_type = other DNA
atggctgccgatggttatcttccagattggctcgaggacaaccttagtgaaggaattcgcgagtggtgggcgctgaaacctggagccccgaagcccaaagccaaccagcaaaagcaggacgacggccggggtctggtgcttcctggctacaagtacctcggacccttcaacggactcgacaagggggagcccgtcaacgcggcggacgcagcggccctcgagcacgacaaggcctacgaccagcagctcaaagcgggtgacaatccgtacctgcggtataaccacgccgacgccgagtttcaggagcgtctgcaagaagatacgtcttttgggggcaacctcgggcgagcagtcttccaggccaagaagcgggttctcgaacctctcggtctggttgaggaaggcgctaagacggctcctggaaagaaacgtccggtagagcagtcgccacaagagccagactcctcctcgggcatcggcaagacaggccagcagcccgctaaaaagagactcaatttcggtcagactggcgacacagagtcagtcccagaccctcaaccaatcggagaacctcccgcagccccctcaggtgtgggatctcttacaatggcttcaggtggtggcgcaccagtggcagacaataacgaaggtgccgatggagtgggtagttcctcgggaaattggcattgcgattcccaatggctgggggacagagtcatcaccaccagcaccagaacctgggccttgcccacctacaataaccacctctacaagcaaatctccaacagcacatctggaggatcttcaaatgacaacgcctacttcggctacagcaccccctgggggtattttgactttaacagattccactgccacttttcaccacgtgactggcagcgactcatcaacaacaactggggattccgacccaagagactcaacttcaagctcttcaacatccaggtcaaggaggtcacgcagaacgaaggcaccaagaccatcgccaataacctcaccagcaccatccaggtgtttacggactcggagtaccagctgccgtacgttctcggctccgcccaccagggctgcctgcctccgttcccggcggacgtgttcatgattccccagtacggctacctaacgctcaacaacggtagtcaggccgtgggacgctcctccttctactgcctggaatactttccttcgcagatgctgagaaccggcaacaacttccagtttacttacaccttcgaggacgtgcctttccacagcagctacgcgcacagccagagcttggaccggctgatgaatcctctgattgaccagtacctgtactacttgtctcggactcaaacaacaggaggcacggcaaatacgcagactctgggcttcagccaaggtgggcctaatacaatggccaatcaggcaaagaactggctgccaggaccctgttaccgccaacaacgcgtctcaacgacaaccgggcaaaacaacaatagcaactttgcctggactgctgggaccaaataccatctgaatggaagaaattcattggctaatcctggcatcgctatggcaacacacaaagacgacaaggagcgtttttttcccagtaacgggatcctgatttttggcaaacaaaatgctgccagagacaatgcggattacagcgatgtcatgctcaccagcgaggaagaaatcaaaaccactaaccctgtggctacagaggaatacggtatcgtggcagataacttgcagcagcaaaacacggctcctcaaattggaactgtcaacagccagggggccttacccggtatggtctggcagaaccgggacgtgtacctgcagggtcccatctgggccaagattcctcacacggacggcaacttccacccgtctccgctgatgggcggctttggcctgaaacatcctccgcctcagatcctgatcaagaacacgcctgtacctgcggatcctccgaccaccttcaaccagtcaaagctgaactctttcatcacgcaatacagcaccggacaggtcagcgtggaaattgaatgggagctgcagaaggaaaacagcaagcgctggaaccccgagatccagtacacctccaactactacaaatctacaagtgtggactttgctgttaatacagaaggcgtgtactctgaaccccaccccattggcacccgttacctcacccgtcccctgtaa

SEQ ID NO: 1036 - DNA, 2214 bp, synthetic construct
  misc_feature 1..2214: note = source = /note="Description of Artificial Sequence: Synthetic polynucleotide"
  source 1..2214: mol_type = other DNA
atggctgccgatggttatcttccagattggctcgaggacaaccttagtgaaggaattcgcgagtggtgggcgctgaaacctggagccccgaagcccaaagccaaccagcaaaagcaggacgacggccggggtctggtgcttcctggctacaagtacctcggacccttcaacggactcgacaagggggagcccgtcaacgcggcggacgcagcggccctcgagcacgacaaggcctacgaccagcagctcaaagcgggtgacaatccgtacctgcggtataaccacgccgacgcggagtttcaggagcgccttaaagaagatacgtcttttgggggcaacctcgggcgagcagtcttccaggccaagaagagggttctcgaaccttttggtctggttgaggaaggtgctaagacggctcctggaaagaaacgtccggtagagcagtcgccacaagagccagactcctcctcgggcatcggcaagacaggccagcagcccgctaaaaagagactcaattttggtcagactggcgactcagagtcagttccagaccctcaacctctcggagaacctccagcagcgccctctggtgtgggacctaatacaatggctgcaggcggtggcgcaccaatggcagacaataacgaaggtgccgatggagtgggtagttcctcgggaaattggcattgcgattcccaatggctggggaacagagtcatcaccaccagcacccgaacctgggccctgcccacctacaacaatcacctctacaagcaaatctccaacagcacatctggaggatcttcaaatgacaacgcctacttcggctacagcaccccctgggggtattttgacttcaacagattccactgccacttctcaccacgtgactggcagcgactcatcaacaacaactggggattccggcccaagagactcaacttcaagctcttcaacattcaggtcaaagaggttacggacaacaatggagtcaagaccatcgccaataaccttaccagcacggtccaggtcttcacggactcggagtaccagttgccgtacgtcctcggctctgcgcaccagggctgcctccctccgttcccggcggacgtgttcatgattccgcaatacggctacctgacgctcaacaacggtagccaagccgtgggacgttcatccttttactgcctggaatatttcccttctcagatgctgagaaccggcaacaacttccagtttacttacaccttcgaggacgtgcctttccacagcagctacgcgcacagccagagcttggaccggctgatgaatcctctgattgaccagtacctgtactacttgtctcggactcaaacaacaggaggcacggcaaatacgcagactctgggcttcagccaaggtgggcctaatacaatggccaatcaggcaaagaactggctgccaggaccctgttaccgccaacaacgcgtctcaacgacaaccgggcaaaacaacaatagcaactttgcctggactgctgggaccaaataccatctgaatggaagaaattcattggctaatcctggcatcgctatggcaacacacaaagacgacaaggagcgtttttttcccagtaacgggatcctgatttttggcaaacaaaatgctgccagagacaatgcggattacagcgatgtcatgctcaccagcgaggaagaaatcaaaaccactaaccctgtggctacagaggaatacggtatcgtggcagataacttgcagcagcaaaacacggctcctcaaattggaactgtcaacagccagggggccttacccggtatggtctggcagaaccgggacgtgtacctgcagggtcccatctgggccaagattcctcacacggacggcaacttccacccgtctccgctgatgggcggctttggcctgaaacatcctccgcctcagatcctgatcaagaacacgcctgtacctgcggatcctccgaccaccttcaaccagtcaaagctgaactctttcatcacgcaatacagcaccggacaggtcagcgtggaaattgaatgggagctgcagaaggaaaacagcaagcgctggaaccccgagatccagtacacctccaactactacaaatctacaagtgtggactttgctgttaatacagaaggcgtgtactctgaaccccaccccattggcacccgttacctcacccgtcccctgtaa

SEQ ID NO: 1037 - DNA, 2211 bp, synthetic construct
  misc_feature 1..2211: note = source = /note="Description of Artificial Sequence: Synthetic polynucleotide"
  source 1..2211: mol_type = other DNA
atggctgccgatggttatcttccagattggctcgaggacaacctctctgagggcattcgcgagtggtgggacttgaaacctggagccccgaagcccaaagccaaccagcaaaagcaggacgacggccggggtctggtgcttcctggctacaagtacctcggacccttcaacggactcgacaggggggagcccgtcaacgcggcggacgcagcggccctcgagcacgacaaggcctacgaccagcagctcaaagcgggtgacaatccgtacctgcggtataaccacgccgacgccgagtttcaggagcgtctgcaagaagatacgtcttttgggggcaacctcgggcgagcagtcttccaggccaagaagcgggttctcgaacctctcggtctggttgaggaaggcgctaagacggctcctggaaagaaacgtccggtagagcagtcgccacaagagccagactcctcctcgggcatcggcaagacaggccagcagcccgctaaaaagagactcaattttggtcagactggcgactcagagtcagtccccgacccacaacctctcggagaacctccagcaacccccgctgctgtgggacctactacaatggcttcaggcggtggcgcaccaatggcagacaataacgaaggcgccgacggagtgggtaatgcctcaggaaattggcattgcgattccacatggctgggcgacagagtcatcaccaccagcacccgaacctgggccttgcccacctataacaaccacctctacaagcaaatctccagtgcttcaacgggggccagcaacgacaaccactacttcggctacagcaccccctgggggtattttgacttcaacagattccactgccacttctcaccacgtgactggcagcgactcatcaacaacaactggggattccggcctaagcgactcaacttcaagctcttcaacattcaggtcaaagaggttacggacaacaatggagtcaagaccatcgccaataacctcaccagcaccatccaggtgtttacggactcggagtaccagctgccgtacgttctcggctctgcccaccagggctgcctgcctccgttcccggcggacgtgttcatgattccccagtacggctacctaacactcaacaacggtagtcaggccgtgggacgctcctccttctactgcctggaatactttccttcgcagatgctgagaaccggcaacaacttccagtttacttacaccttcgaggacgtgcctttccacagcagctacgcccacagccagagcttggaccggctgatgaatcctctgattgaccagtacctgtactacttgtctcggactcaaacaacaggaggcacggcaaatacgcagactctgggcttcagccaaggtgggcctaatacaatggccaatcaggcaaagaactggctgccaggaccctgttaccgccaacaacgcgtctcaacgacaaccgggcaaaacaacaatagcaactttgcctggactgctgggaccaaataccatctgaatggaagaaattcattggctaatcctggcatcgctatggcaacacacaaagacgacaaggagcgtttttttcccagtaacgggatcctgatttttggcaaacaaaatgctgccagagacaatgcggattacagcgatgtcatgctcaccagcgaggaagaaatcaaaaccactaaccctgtggctacagaggaatacggtatcgtggcagataacttgcagcagcaaaacacggctcctcaaattggaactgtcaacagccagggggccttacccggtatggtctggcagaaccgggacgtgtacctgcagggtcccatctgggccaagattcctcacacggacggcaacttccacccgtctccgctgatgggcggctttggcctgaaacatcctccgcctcagatcctgatcaagaacacgcctgtacctgcggatcctccgaccaccttcaaccagtcaaagctgaactctttcatcacgcaatacagcaccggacaggtcagcgtggaaattgaatgggagctgcagaaggaaaacagcaagcgctggaaccccgagatccagtacacctccaactactacaaatctacaagtgtggactttgctgttaatacagaaggcgtgtactctgaaccccaccccattggcacccgttacctcacccgtcccctgtaa

SEQ ID NO: 1038 - DNA, 2211 bp, synthetic construct
  misc_feature 1..2211: note = source = /note="Description of Artificial Sequence: Synthetic polynucleotide"
  source 1..2211: mol_type = other DNA
atggctgccgatggttatcttccagattggctcgaggacaacctctctgagggcattcgcgagtggtgggacttgaaacctggagccccgaagcccaaagccaaccagcaaaagcaggacgacggccggggtctggtgcttcctggctacaagtacctcggacccttcaacggactcgacaagggggagcccgtcaacgcggcggacgcagcggccctcgagcacgacaaggcctacgaccagcagctcaaagcgggtgacaatccgtacctgcggtataaccacgccgacgccgagtttcaggagcgtctgcaagaagatacgtcttttgggggcaacctcgggcgagcagtcttccaggccaagaagcgggttctcgaacctctcggtctggttgaggaaggcgctaagacggctcctggaaagaaacgtccggtagagcagtcgccacaagagccagactcctcctcgggcatcggcaagaaaggccaacagcccgccagaaaaagactcaattttggtcagactggcgactcagagtcagttccagaccctcaacctctcggagaacctcccgcagccccctcaggtgtgggatctcttacaatggcttcaggcggtggcgcaccaatggcagacaataacgaaggcgccgacggagtgggtaatgcctcaggaaattggcattgcgattccacatggctgggcgacagagtcatcaccaccagcacccgaacatgggccttgcccacttacaacaaccatctctacaagcaaatctccagtgcttcaacgggggccagcaacgacaaccactacttcggctacagcaccccctgggggtattttgatttcaacagattccactgccacttttcaccacgtgactggcaaagactcatcaacaacaactggggattccgacccaagagactcaacttcaagctctttaacattcaagtcaaagaggtcacgcagaatgaaggcaccaagaccatcgccaataaccttaccagcacggtccaggtcttcacggactcagactatcagctcccgtacgttctcggctccgcccaccagggctgcctgcctccgttcccggcggacgtgttcatgattccccagtacggctacctaacactcaacaacggtagtcaggccgtgggacgctcctccttctactgcctggaatactttccttcgcagatgctgagaaccggcaacaacttccagtttacttacacctttgaggacgttcctttccacagcagctacgctcacagccagagtctggaccgtctcatgaatcctctgattgaccagtacctgtactacttgtctcggactcaaacaacaggaggcacggcaaatacgcagactctgggcttcagccaaggtgggcctaatacaatggccaatcaggcaaagaactggctgccaggaccctgttaccgccaacaacgcgtctcaacgacaaccgggcaaaacaacaatagcaactttgcctggactgctggaaccaaataccatctgaatggaagaaattcattgtctaatcctggcatcgctatggcgacacacaaagacgacaaggagcgtttttttcccagtaacgggatcctgatttttggcaaacaaaatgctgccagagacaatgcggattacagcgatgtcatgctcaccagcgaggaagaaatcaaaaccactaaccctgtggctacagaggaatacggtatcgtggcagataacttgcagcagcaaaacacggctcctcaaattggaactgtcaacagccagggggccttacccggtatggtctggcagaaccgggacatgtacctgcagggtcccatctgggccaagattcctcacacggacggcaacttccacccgtctccgctgatgggcggctttggcctgaaacatcctccgcctcagatcctgatcaagaacacgcctgtacctgcggatcctccgaccaccttcaaccagtcaaagctgaactctttcatcacgcaatacagcaccggacaggtcagcgtggaaattgaatgggagctgcagaaggaaaacagcaagcgctggaaccccgagatccagtacacctccaactactacaaatctacaagtgtggactttgctgttaatacagaaggcgtgtactctgaaccccaccccattggcacccgttacctcacccgtcccctgtaa

SEQ ID NO: 1039 - DNA, 2211 bp, synthetic construct
  misc_feature 1..2211: note = source = /note="Description of Artificial Sequence: Synthetic polynucleotide"
  source 1..2211: mol_type = other DNA
atggctgccgatggttatcttccagattggctcgaggacaacctctctgagggcattcgcgagtggtgggcgctgaaacctggagccccgaagcccaaagccaaccagcaaaagcaggacgacggccggggtctggtgcttcctggctacaagtacctcggacccttcaacggactcgacaagggggagcccgtcaacgcggcggatgcagcggccctcgagcacgacaaggcctacgaccagcagctcaaagcgggtgacaatccgtacctgcggtataaccacgccgacgccgagtttcaggagcgtctgcaggaagatacgtcttttgggggcaacctcgggcgagcagtcttccaggccaagaagagggttctcgaaccttttggtctggttgaggaaggcgctaagacggctcctggaaagaaacgtccggtagagcagtcgccacaagagccagactcctcctcgggcatcggcaagacaggccagcagcccgctaaaaagagactcaattttggtcagactggcggctcagagtcagtccccgacccacaacctctcggagaacctccagcaacccccgctgctgtgggacctactacaatggctgcaggcggtggcgcaccaatggcagacaataacgaaggcgccgacggagtgggtagttcctcgggaaattggcattgcgattccacatggctgggcgacagagtcatcaccaccagcaccagaacctgggccttgcccacctataacaaccacctctacaagcaaatctccagtgcttcaacgggggccagcaacgacaaccactacttcggctacagcaccccctgggggtattttgatttcaacagattccactgccatttctcaccacgtgactggcagcgactcatcaacaacaactggggattccggcccaagagactcaacttcaaactcttcaacattcaggtcaaagaggttacggacaacaatggagtcaagaccatcgccaataaccttaccagcacggtccaggtgtttacggactcggagtaccagctgccgtacgttctcggctctgcccaccagggctgcctccctccgttcccggcggacgtgttcatgattccgcagtacggctacctaacgctcaacaatggcagccaggcagtgggacggtcatccttttactgcctggaatatttcccttctcagatgctgagaacgggcaacaactttaccttcagctacacctttgaggaagtgcctttccacagcagctacgcgcacagccagagcctggaccggctgatgaatcctctgattgaccagtacctgtactacttgtctcggactcaaacaacaggaggcacggcaaatacgcagactctgggcttcagccaaggtgggcctaatacaatggccaatcaggcaaagaactggctgccaggaccctgttaccgccaacaacgcgtctcaacgacaaccgggcaaaacaacaatagcaactttgcctggactgctgggaccaaataccatctgaatggaagaaattcattggctaatcctggcatcgctatggcctcacacaaagacgacaaggagcgtttttttcccagtaacgggatcctgatttttggcaaacaaaatgctgccagagacaatgcggattacagcgatgtcatgctcaccagcgaggaagaaatcaaaaccactaaccctgtggctacagaggaatacggtatcgtggcagataacttgcagcagcaaaacacggctcctcaaattggaactgtcaacagccagggggccttacccggtatggtctggcagaaccgggacgtgtacctgcagggtcccatctgggccaagattcctcacacggacggcaacttccacccgtctccgctgatgggcggctttggcctgaaacatcctccgcctcagatcctgatcaagaacacgcctgtacctgcggatcctccgaccaccttcaaccagtcaaagctgaactctttcatcacgcaatacagcaccggacaggtcagcgtggaaattgaatgggagctgcagaaggaaaacagcaagcgctggaaccccgagatccagtacacctccaactactacaaatctacaagtgtggactttgctgttaatacagaaggcgtgtactctgaaccccaccccattggcacccgttacctcacccgtcccctgtaa

SEQ ID NO: 1040 - protein, 736 aa, synthetic construct
  REGION 1..736: note = source = /note="Description of Artificial Sequence: Synthetic polypeptide"
MAADGYLPDWLEDTLSEGIRQWWKLKPGPPPPKPAERHKDDSRGLVLPGYKYLGPFNGLDKGEPVNEADAAALEHDKAYDQQLKAGDNPYLKYNHADAEFQERLKEDTSFGGNLGRAVFQAKKRVLEPLGLVEEGAKTAPGKKRPVEQSPQEPDSSSGIGKTGQQPAKKRLNFGQTGDSESVPDPQPLGEPPATPAAVGPTTMASGGGAPMADNNEGADGVGSSSGNWHCDSQWLGDRVITTSTRTWALPTYNNHLYKQISSASTGASNDNHYFGYSTPWGYFDFNRFHCHFSPRDWQRLINNNWGFRPKRLNFKLFNIQVKEVTQNEGTKTIANNLTSTIQVFTDSEYQLPYVLGSAHQGCLPPFPADVFMIPQYGYLTLNNGSQAVGRSSFYCLEYFPSQMLRTGNNFQFTYTFEDVPFHSSYAHSQSLDRLMNPLIDQYLYYLSRTQTTGGTANTQTLGFSQGGPNTMANQAKNWLPGPCYRQQRVSTTTGQNNNSNFAWTAGTKYHLNGRNSLANPGIAMATHKDDKERFFPSNGILIFGKQNAARDNADYSDVMLTSEEEIKTTNPVATEEYGIVADNLQQQNTAPQIGTVNSQGALPGMVWQNRDVYLQGPIWAKIPHTDGNFHPSPLMGGFGLKHPPPQILIKNTPVPADPPTTFNQSKLNSFITQYSTGQVSVEIEWELQKENSKRWNPEIQYTSNYYKSTSVDFAVNTEGVYSEPHPIGTRYLTRPL

SEQ ID NO: 1041 - protein, 736 aa, synthetic construct
  REGION 1..736: note = source = /note="Description of Artificial Sequence: Synthetic polypeptide"
MAADGYLPDWLEDNLSEGIREWWALKPGAPKPKANQQKQDDGRGLVLPGYKYLGPFNGLDKGEPVNAADAAALEHDKAYDQQLKAGDNPYLKYNHADAEFQERLKEDTSFGGNLGRAVFQAKKRLLEPLGLVEEAAKTAPGKKRPVEQSPQEPDSSAGIGKSGAQPAKKRLNFGQTGDSESVPDPQPLGEPPATPAAVGPTTMASGGGAPMADNNEGADGVGNASGNWHCDSTWLGDRVITTSTRTWALPTYNNHLYKQISSASTGASNDNHYFGYSTPWGYFDFNRFHCHFSPRDWQRLINNNWGFRPKRLNFKLFNIQVKEVTQNEGTKTIANNLTSTIQVFTDSEYQLPYVLGSAHQGCLPPFPADVFMIPQYGYLTLNNGSQAVGRSSFYCLEYFPSQMLRTGNNFQFTYTFEDVPFHSSYAHSQSLDRLMNPLIDQYLYYLSRTQTTGGTANTQTLGFSQGGPNTMANQAKNWLPGPCYRQQRVSTTTGQNNNSNFAWTAGTKYHLNGRNSLANPGIAMATHKDDKERFFPSNGILIFGKQNAARDNADYSDVMLTSEEEIKATNPVATEEYGIVADNLQQQNTAPQIGTVNSQGALPGMVWQNRDVYLQGPIWAKIPHTDGNFHPSPLMGGFGLKHPPPQILIKNTPVPADPPTTFNQSKLNSFITQYSTGQVSVEIEWELQKENSKRWNPEIQYTSNYYKSTSVDFAVNTEGVYSEPHPIGTRYLTRPL

SEQ ID NO: 1042 - protein, 737 aa, synthetic construct
  REGION 1..737: note = source = /note="Description of Artificial Sequence: Synthetic polypeptide"
MAADGYLPDWLEDNLSEGIREWWDLKPGAPKPKANQQKQDDGRGLVLPGYKYLGPFNGLDKGEPVNAADAAALEHDKAYDQQLKAGDNPYLRYNHADAEFQERLQEDTSFGGNLGRAVFQAKKRVLEPLGLVEEGANTAPGKKRPVEQSPQEPDSSAGIGKSGAQPAKKRLNFGQTGDTESVPDPQPIGEPPAAPSGVGSLTMASGGGAPVADNNEGADGVGSSSGNWHCDSQWLGDRVITTSTRTWALPTYNNHLYKQISNSTSGGSSNDNAYFGYSTPWGYFDFNRFHCHFSPRDWQRLINNNWGFRPKRLNFKLFNIQVKEVTDNNGVKTIANNLTSTIQVFTDSEYQLPYVLGSAHQGCLPPFPADVFMIPQYGYLTLNNGSQAVGRSSFYCLEYFPSQMLRTGNNFQFTYTFEDVPFHSSYAHSQSLDRLMNPLIDQYLYYLSRTQTTGGTANTQTLGFSQGGPNTMANQAKNWLPGPCYRQQRVSTTTGQNNNSNFAWTAGTKYHLNGRNSLANPGIAMASHKDDKERFFPSNGILIFGKQNAARDNADYSDVMLTSEEEIKTTNPVATEEYGIVADNLQQQNTAPQIGTVNSQGALPGMVWQNRDVYLQGPIWAKIPHTDGNFHPSPLMGGFGLKHPPPQILIKNTPVPADPPTTFNQSKLNSFITQYSTGQVSVEIEWELQKENSKRWNPEIQYTTNYYKSTSVDFAVNTEGVYSEPHPIGTRYLTRPL

SEQ ID NO: 1043 - protein, 736 aa, synthetic construct
  REGION 1..736: note = source = /note="Description of Artificial Sequence: Synthetic polypeptide"
MAADGYLPDWLEDNLSEGIREWWALKPGAPKPKANQQKQDDGRGLVLPGYKYLGPFNGLDKGEPVNEADAAALEHDKAYDQQLKAGDNPYLRYNHADAEFQERLQEDTSFGGNLGRAVFQAKKRVLEPLGLVEEGAKTAPGKKRPVEQSPQEPDSSSGIGKTGQQPAKKRLNFGQTGDSESVPDPQPLGEPPATPAAVGPTTMASGGGAPMADNNEGADGVGNASGNWHCDSTWLGDRVITTSTRTWALPTYNNHLYKQISSASTGASNDNHYFGYSTPWGYFDFNRFHCHFSPRDWQRLINNNWGFRPKRLNFKLFNIQVKEVTQNEGTKTIANNLTSTIQVFTDSEYQLPYVLGSAHQGCLPPFPADVFMIPQYGYLTLNNGSQAVGRSSFYCLEYFPSQMLRTGNNFQFTYTFEDVPFHSSYAHSQSLDRLMNPLIDQYLYYLSRTQTTGGTANTQTLGFSQGGPNTMANQAKNWLPGPCYRQQRVSTTTGQNNNSNFAWTAGTKYHLNGRNSLANPGIAMATHKDDKERFFPSNGILIFGKQNAARDNADYSDVMLTSEEEIKTTNPVATEEYGIVADNLQQQNTAPQIGTVNSQGALPGMVWQNRDVYLQGPIWAKIPHTDGNFHPSPLMGGFGLKHPPPQILIKNTPVPADPPTTFNQSKLNSFITQYSTGQVSVEIEWELQKENSKRWNPEIQYTSNYYKSTSVDFAVNTEGVYSEPHPIGTRYLTRPL

SEQ ID NO: 1044 - protein, 736 aa, synthetic construct
  REGION 1..736: note = source = /note="Description of Artificial Sequence: Synthetic polypeptide"
MAADGYLPDWLEDNLSEGIREWWALKPGAPKPKANQQKQDDGRGLVLPGYKYLGPFNGLDKGEPVNEADAAALEHDKAYDQQLKAGDNPYLRYNHADAEFQERLQEDTSFGGNLGRAVFQAKKRVLEPFGLVEEGAKTAPGKKRPVEQSPQEPDSSSGIGKTGQQPAKKRLNFGQTGDSESVPDPQPLGEPPATPAAVGPTTMASGGGAPMADNNEGADGVGNASGNWHCDSQWLGDRVITTSTRTWALPTYNNHLYKQISSASTGASNDNHYFGYSTPWGYFDFNRFHCHFSPRDWQRLINNNWGFRPKRLNFKLFNIQVKEVTDNNGVKTIANNLTSTVQVFSDSEYQLPYVLGSAHQGCLPPFPADVFMIPQYGYLTLNNGSQAVGRSSFYCLEYFPSQMLRTGNNFQFTYTFEDVPFHSSYAHSQSLDRLMNPLIDQYLYYLSRTQTTGGTANTQTLGFSQGGPNTMANQAKNWLPGPCYRQQRVSTTTGQNNNSNFAWTAGTKYHLNGRNSLANPGIAMATHKDDKERFFPSNGILIFGKQNAARDNADYSDVMLTSEEEIKTTNPVATEEYGIVADNLQQQNTAPQIGTVNSQGALPGMVWQNRDVYLQGPIWAKIPHTDGNFHPSPLMGGFGLKHPPPQILIKNTPVPADPPTTFNQSKLNSFITQYSTGQVSVEIEWELQKENSKRWNPEIQYTSNYYKSTSVDFAVNTEGVYSEPHPIGTRYLTRPL

SEQ ID NO: 1045 - protein, 736 aa, synthetic construct
  REGION 1..736: note = source = /note="Description of Artificial Sequence: Synthetic polypeptide"
MAADGYLPDWLEDTLSEGIRQWWKLKPGPPPPKPAERHKDDSRGLVLPGYKYLGPFNGLDKGEPVNEADAAALEHDKAYDRQLDSGDNPYLKYNHADAEFQERLKEDTSFGGNLGRAVFQAKKRVLEPFGLVEEGAKTAPGKKRPVEQSPQEPDSSSGIGKTGQQPAKKRLNFGQTGDSESVPDPQPLGEPPATPAAVGPTTMASGGGAPMADNNEGADGVGNASGNWHCDSTWLGDRVITTSTRTWALPTYNNHLYKQISSASTGASNDNHYFGYSTPWGYFDFNRFHCHFSPRDWQRLINNNWGFRPKRLNFKLFNIQVKEVTDNNGVKTIANNLTSTVQVFTDSDYQLPYVLGSAHEGCLPPFPADVFMIPQYGYLTLNNGSQAVGRSSFYCLEYFPSQMLRTGNNFQFTYTFEDVPFHSSYAHSQSLDRLMNPLIDQYLYYLSRTQTTGGTANTQTLGFSQGGPNTMANQAKNWLPGPCYRQQRVSTTTGQNNNSNFAWTAGTKYHLNGRNSLANPGIAMATHKDDKERFFPSNGILIFGKQNAARDNADYSDVMLTSEEEIKTTNPVATEEYGIVADNLQQQNTAPQIGTVNSQGALPGMVWQNRDVYLQGPIWAKIPHTDGNFHPSPLMGGFGLKHPPPQILIKNTPVPADPPTTFNQSKLNSFITQYSTGQVSVEIEWELQKENSKRWNPEIQYTSNYYKSTSVDFAVNTEGVYSEPHPIGTRYLTRNL

SEQ ID NO: 1046 - protein, 738 aa, synthetic construct
  REGION 1..738: note = source = /note="Description of Artificial Sequence: Synthetic polypeptide"
MAADGYLPDWLEDNLSEGIREWWDLKPGAPKPKANQQKQDDGRGLVLPGYKYLGPFNGLDKGEPVNAADAAALEHDKAYDQQLQAGDNPYLRYNHADAEFQERLQEDTSFGGNLGRAVFQAKKRVLEPLGLVEEGAKTAPGKKRPVEPSPQRSPDSSTGIGKKGQQPARKRLNFGQTGDSESVPDPQPLGEPPAAPSGVGPNTMAAGGGAPMADNNEGADGVGSSSGNWHCDSQWLGDRVITTSTRTWALPTYNNHLYKQISNSTSGGSSNDNAYFGYSTPWGYFDFNRFHCHFSPRDWQRLINNNWGFRPKRLSFKLFNIQVKEVTQNEGTKTIANNLTSTIQVFTDSEYQLPYVLGSAHQGCLPPFPADVFMIPQYGYLTLNNGSQAVGRSSFYCLEYFPSQMLRTGNNFTFSYTFEDVPFHSSYAHSQSLDRLMNPLIDQYLYYLSRTQTTGGTANTQTLGFSQGGPNTMANQAKNWLPGPCYRQQRVSTTTGQNNNSNFAWTAGTKYHLNGRNSLANPGIAMATHKDDKERFFPSNGILIFGKQNAARDNADYSDVMLTSEEEIKTTNPVATEEYGIVADNLQQQNTAPQIGTVNSQGALPGMVWQNRDVYLQGPIWAKIPHTDGNFHPSPLMGGFGLKHPPPQILIKNTPVPADPPTTFNQSKLNSFITQYSTGQVSVEIEWELQKENSKRWNPEIQYTSNYYKSTSVDFAVNTEGVYSEPHPIGTRYLTRPL

SEQ ID NO: 1047 - protein, 737 aa, synthetic construct
  REGION 1..737: note = source = /note="Description of Artificial Sequence: Synthetic polypeptide"
MAADGYLPDWLEDNLSEGIREWWDLKPGAPKPKANQQKQDDGRGLVLPGYKYLGPFNGLDKGEPVNAADAAALEHDKAYDQQLKAGDNPYLRYNHADAEFQERLQEDTSFGGNLGRAVFQAKKRVLEPFGLVEEGAKTAPGKKRPVEQSPQEPDSSSGIGKTGQQPAKKRLNFGQTGDSESVPDPQPLGEPPATPAAVGPTTMASGGGAPMQDNNEGADGVGSSSGNWHCDSTWLGDRVITTSTRTWALPTYNNHLYKQISNGTSGGATNDNTYFGYSTPWGYFDFNRFHCHFSPRDWQRLINNNWGFRPKRLNFKLFNIQVKEVTQNEGTKTIANNLTSTIQVFTDSEYQLPYVLGSAHQGCLPPFPADVFMIPQYGYLTLNNGSQAVGRSSFYCLEYFPSQMLRTGNNFTFSYTFEDVPFHSSYAHSQSLDRLMNPLIDQYLYYLSRTQTTGGTANTQTLGFSQGGPNTMANQAKNWLPGPCYRQQRVSTTTGQNNNSNFAWTAGTKYHLNGRNSLANPGIAMATHKDDKERFFPSNGILIFGKQNAARDNADYSDVMLTSEEEIKTTNPVATEEYGIVADNLQQQNTAPQIGTVNSQGALPGMVWQNRDVYLQGPIWAKIPHTDGNFHPSPLMGGFGLKHPPPQILIKNTPVPADPPTTFNQSKLNSFITQYSTGQVSVEIEWELQKENSKRWNPEIQYTSNYYKSTSVDFAVNTEGVYSEPHPIGTRYLTRPL

SEQ ID NO: 1048 - protein, 736 aa, synthetic construct
  REGION 1..736: note = source = /note="Description of Artificial Sequence: Synthetic polypeptide"
MAADGYLPDWLEDNLSEGIREWWALKPGAPKPKANQQKQDDGRGLVLPGYKYLGPFNGLDKGEPVNAADAAALEHDKAYDQQLKAGDNPYLRYNHADAEFQERLQEDTSFGGNLGRAVFQAKKRVLEPLGLVEEGAKTAPGKKRPVEQSPQEPDSSSGIGKTGQQPAKKRLNFGQTGDSESVPDPQPLGEPPATPAAVGPTTMASGGGAPMADNNEGADGVGSSSGNWHCDSTWLGDRVITTSTRTWALPTYNNHLYKQISSASTGASNDNHYFGYSTPWGYFDFNRFHCHFSPRDWQRLINNNWGFRPKRLNFKLFNIQVKEVTDNNGVKTIANNLTSTVQVFTDSDYQLPYVLGSAHEGCLPPFPADVFMIPQYGYLTLNNGSQAVGRSSFYCLEYFPSQMLRTGNNFTFSYTFEDVPFHSSYAHSQSLDRLMNPLIDQYLYYLSRTQTTGGTANTQTLGFSQGGPNTMANQAKNWLPGPCYRQQRVSTTTGQNNNSNFAWTAGTKYHLNGRNSLANPGIAMATHKDDKERFFPSNGILIFGKQNAARDNADYSDVMLTSEEEIKTTNPVATEEYGIVADNLQQQNTAPQIGTVNSQGALPGMVWQNRDVYLQGPIWAKIPHTDGNFHPSPLMGGFGLKHPPPQILIKNTPVPADPPTTFNQSKLNSFITQYSTGQVSVEIEWELQKENSKRWNPEIQYTSNYYKSTSVDFAVNTEGVYSEPHPIGTRYLTRPL

SEQ ID NO: 1049 - protein, 737 aa, synthetic construct
  REGION 1..737: note = source = /note="Description of Artificial Sequence: Synthetic polypeptide"
MAADGYLPDWLEDNLSEGIREWWDLKPGAPKPKANQQKQDDGRGLVLPGYKYLGPFNGLDKGEPVNAADAAALEHDKAYDQQLKAGDNPYLRYNHADAEFQERLQEDTSFGGNLGRAVFQAKKRVLEPLGLVEEGAKTAPGKKRPVEPSPQRSPDSSTGIGKKGQQPARKRLNFGQTGDSESVPDPQPLGEPPATPAAVGPTTMASGGGAPMADNNEGADGVGNASGNWHCDSTWLGDRVITTSTRTWALPTYNNHLYKQISSASTGASNDNHYFGYSTPWGYFDFNRFHCHFSPRDWQRLINNNLGSRPKRLNFKLFIIQVKEVTTNDGVTTIANNLTSTVQVFSDSEYQLPYVLGSAHQGCLPPFPADVFMIPQYGYLTLNNGSQAVGRSSFYCLEYFPSQMLRTGNNFTFSYTFEDVPFHSSYAHSQSLDRLMNPLIDQYLYYLNRTQNQSGSAQNKDLLFSRGSPAGMSVQPKNWLPGPCYRQQRVSKTKTDNNNSNFTWTGASKYNLNGRESIINPGTAMASHKDDKDKFFPMSGVMIFGKESAGASNTALDNVMITDEEEIKATNPVATERFGTVAVNLQSSSTDPATGDVHVMGALPGMVWQDRDVYLQGPIWAKIPHTDGHFHPSPLMGGFGLKHPPPQILIKNTPVPANPPAEFSATKFASFITQYSTGQVSVEIEWELQKENSKRWNPEVQYTSNYAKSANVDFTVDNNGLYTEPRPIGTRYLTRPL

SEQ ID NO: 1050 - protein, 736 aa, synthetic construct
  REGION 1..736: note = source = /note="Description of Artificial Sequence: Synthetic polypeptide"
MAADGYLPDWLEDNLSEGIREWWALKPGAPKPKANQQKQDDGRGLVLPGYKYLGPFNGLDKGEPVNAADAAALEHDKAYDQQLKAGDNPYLRYNHADAEFQERLQEDTSFGGNLGRAVFQAKKRLLEPLGLVEEAAKTAPGKKRPVEQSPQEPDSSSGIGKTGQQPAKKRLNFGQTGDSESVPDPQPIGEPPATPAAVGPTTMASGGGAPMADNNEGADGVGNSSGNWHCDSTWLGDRVITTSTRTWALPTYNNHLYKQISSASTGASNDNHYFGYSTPWGYFDFNRFHCHFSPRDWQRLINNNWGFRPKRLNFKLFNIQVKEVTQNEGTKTIANNLTSTIQVFTDSEYQLPYVLGSAHQGCLPPFPADVFMIPQYGYLTLNNGSQAVGRSSFYCLEYFPSQMLRTGNNFTFSYTFEDVPFHSSYAHSQSLDRLMNPLIDQYLYYLSRTQTTGGTANTQTLGFSQGGPNTMANQAKNWLPGPCYRQQRVSTTTGQNNNSNFAWTAGTKYHLNGRNSLANPGIAMATHKDDKERFFPSNGILIFGKQNAARDNADYSDVMLTSEEEIKTTNPVATEEYGIVADNLQQQNTAPQIGTVNSQGALPGMVWQNRDVYLQGPIWAKIPHTDGNFHPSPLMGGFGLKHPPPQILIKNTPVPADPPTTFNQSKLNSFITQYSTGQVSVEIEWELQKENSKRWNPEIQYTSNYYKSTSVDFAVNTEGVYSDPHPIGTRYLTRPL

SEQ ID NO: 1051 - protein, 736 aa, synthetic construct
  REGION 1..736: note = source = /note="Description of Artificial Sequence: Synthetic polypeptide"
MAADGYLPDWLEDNLSEGIREWWALKPGAPKPKANQQEQDDGRGLVLPGYKYLGPFNGLDKGEPVNAADAAALEHDKAYDQQLKAGDNPYLRYNHADAEFQERLQEDTSFGGNLGRAVFQAKKRVLEPFGLVEEGAKTAPGKKRPVEQSPQEPDSSSGIGKTGQQPAKKRLNFGQTGDSESVPDPQPLGEPPAAPSGVGPNTMAAGGGAPMADNNEGADGVGSSSGNWHCDSTWLGDRVITTSTRTWALPTYNNHLYKQISSASTGASNDNHYFGYSTPWGYFDFNRFHCHFSPRDWQRLINNNWGFRPKRLNFKLFNIQVKEVTQNEGTKTIANNLTSTIQVFTDSEYQLPYVLGSAHQGCLPPFPADVFMIPQYGYLTLNNGSQAVGRSSFFCLEYFPSQMLRTGNNFTFSYTFEDVPFHSSYAHSQSLDRLMNPLIDQYLYYLSRTQTTGGTANTQTLGFSQGGPNTMANQAKNWLPGPCYRQQRVSTTTGQNNNSNFAWTAGTKYHLNGRNSLANPGIAMATHKDDKERFFPSNGILIFGKQNAARDNADYSDVMLTSEEEIKTTNPVATEEYGIVADNLQQQNTAPQIGTVNSQGALPGMVWQNRDVYLQGPIWAKIPHTDGNFHPSPLMGGFGLKHPPPQILIKNTPVPADPPTTFNQSKLNSFITQYSTGQVSVEIEWELQKENSKRWNPEIQYTSNYYKSTSVDFAVNTEGVYSEPHPIGTRYLTRPL

SEQ ID NO: 1052 - protein, 736 aa, synthetic construct
  REGION 1..736: note = source = /note="Description of Artificial Sequence: Synthetic polypeptide"
MAADGYLPDWLEDNLSEGIREWWDLKPGAPKPKANQQKQDDGRGLVLPGYKYLGPFNGLDKGEPVNAADAAALEHDKAYDQQLKAGDNPYLRYNHADAEFQERLQEDTSFGGNLGRAVFQAKKRVLEPLGLVEEGAKTAPGKKRPVEQSPQEPDSSSGIGKTGQQPAKKRLNFGQTGDSESVPDPQPLGEPPATPAAVGPTTMASGGGAPMADNNEGADGVGNASGNWHCDSTWLGDRVITTSTRTWALPTYNNHLYKQISSASTGASNDNHYFGYSTPWGYFDFNRFHCHFSPRDWQRLINNNWGFRPKRLNFKLFNIQVKEVTTNDGVTTIANNLTSTVQVFSDSEYQLPYVLGSAHQGCLPPFPADVFMIPQYGYLTLNNGSQAVGRSSFYCLEYFPSQMLRTGNNFTFSYTFEDVPFHSSYAHSQSLDRLMNPLIDQYLYYLNRTQNQSGSAQNKDLLFSRGSPAGMSVQPKNWLPGPCYRQQRVSKTKTDNNNSNFTWTGASKYNLNGRESIINPGTAMASHKDDKDKFFPMSGVMIFGKESAGASNTALDNVMITDEEEIKATNPVATERFGTVAVNLQNSSTDPATGDVHVMGALPGMVWQDRDVYLQGPIWAKIPHTDGHFHPSPLMGGFGLKHPPPQILIKNTPVPANPPAEFSATKFASFITQYSTGQVSVEIEWELQKENSKRWNPEVQYTSNYAKSANVDFTVDNNGLYTVPRPIGTRYLTRPL

SEQ ID NO: 1053 - protein, 736 aa, synthetic construct
  REGION 1..736: note = source = /note="Description of Artificial Sequence: Synthetic polypeptide"
MAADGYLPDWLEDNLSEGIREWWALKPGAPKPKANQQKQDDGRGLVLPGYKYLGPFNGLDKGEPVNAADAAALEHDKAYDQQLKAGDNPYLRYNHADAEFQERLQEDTSFGGNLGRAVFQAKKRLLEPLGLVEEGAKTAPGKKRPVEQSPQEPDSSSGIGKTGEQPAKKRLNFGQTGDSESVPDPQPLGEPPATPAAVGPTTMASGGGAPMADNNEGADGVGSASGNWHCDSTWLGDRVITTSTRTWALPTYNNHLYKQISSASTGASNDNHYFGYSTPWGYFDFNRFHCHFSPRDWQRLINNNWGFRPKRLNFKLFNIQVKEVTDNNGVKTIANNLTSTIQVFTDSEYQLPYVLGSAHQGCLPPFPADVFMIPQYGYLTLNNGSQAVGRSSFYCLEYFPSQMLRTGNNFPFSYTFEDVPFHSSYAHSQSLDRLMNPLIDQYLYYLSRTQTTGGTANTQTLGFSQGGPNTMANQAKNWLPGPCYRQQRVSTTTGQNNNSNFAWTAGTKYHLNGRNSLANPGIAMATHKDDKERFFPSNGILIFGKQNAARDNADYSDVMLTSEEEIKTTNPVATEEYGIVADNLQQQNTAPQIGTVNSQGALPGMVWQNRDVYLQGPIWAKIPHTDGNFHPSPLMGGFGLKHPPPQILIKNTPVPADPPTTFNQSKLNSFITQYSTGQVSVEIEWELQKENSKRWNPEIQYTSNYYKSTSVDFAVNTEGVYSEPHPIGTRYLTRPL

SEQ ID NO: 1054 - protein, 736 aa, synthetic construct
  REGION 1..736: note = source = /note="Description of Artificial Sequence: Synthetic polypeptide"
MAADGYLPDWLEDNLSEGIREWWALKPGAPKPKANQQKQDDGRGLVLPGYKYLGPFNGLDKGEPVNAADAAALEHDKAYDQQLKAGDNPYLRYNHADAEFQERLQEDTSFGGNLGRAVFQAKKRVLEPLGLVEEGAKTAPGKKRPVEQSPQEPDSSSGIGKTGQQPAKKRLNFGQTGDSESVPDPQPLGEPPATPAAVGPTTMASGGGAPMADNNEGADGVGSSSGNWHCDSQWLGDRVITTSTRTWALPTYNNHLYKQISSASTGASNDNHYFGYSTPWGYFDFNRFHCHFSPRDWQRLINNNWGFRPKRLNFKLFNIQVKEVTDNNGVKTIANNLTSTVQVFTDSEYQLPYVLGSAHQDCLPPFPADVFMIPQYGYLTLNNGSQAVGRSSFYCLEYFPSQMLRTGNNFTFSYTFEDVPFHSSYAHSQSLDRLMNPLIDQYLYYLSRTQTTGGTANTQTLGFSQGGPNTMANQAKNWLPGPCYRQQRVSTTTGQNNNSNFAWTAGTKYHLNGRNSLANPGIAMATHKDDKERFFPSNGILIFGKQNAARDNADYSDVMLTSEEEIKTTNPVATEEYGIVADNLQQQNTAPQIGTVNSQGALPGMVWQNRDVYLQGPIWAKIPHTDGNFHPSPLMGGFGLKHPPPQILIKNTPVPADPPTTFNQSKLNSFITQYSTGQVSVEIEWELQKENSKRWNPEIQYTSNYYKSTSVDFAVNTEGVYSEPHPIGTRYLTRPL

SEQ ID NO: 1055 - protein, 735 aa, synthetic construct
  REGION 1..735: note = source = /note="Description of Artificial Sequence: Synthetic polypeptide"
MAADGYLPDWLEDNLSEGIREWWDLKPGAPKPKANQQKQDDGRGLVLPGYKYLGPFNGLDKGEPVNAADAAALEHDKAYDQQLKAGDNPYLRYNHADAEFQERLQEDTSFGGNLGRAVFQAKKRVLEPLGLVEEGAKTAPGKKRPVEQSPQEPDSSSGIGKTGQQPAKKRLNFGQTGDSESVPDPQPLGEPPATPAAVGPTTMASGGGAPMADNNEGADGVGNASGNWHCDSTWLGDVITTSTRTWALPTYNNHLYKQISSASTGASNDNHYFGYSTPWGYFDFNRFHCHFSPRDWQRLINNNWGFRPKRLNFKLFNIQVKEVTQNEGTKTIANNLTSTIQVFTDSEYQLPYVLGSAHQGCLPPFPADVFMIPQYGYLTLNNGSQAVGRSSFYCLEYFPSQMLRTGNNFQFTYTFEDVPFHSSYAHSQSLDRLMNPLIDQYLYYLSRTQTTGGTANTQTLGFSQGGPNTMANQAKNWLPGPCYRQQRVSTTTGQNNNSNFAWTAGTKYHLNGRNSLANPGIAMATHKDDKERFFPSNGILIFGKQNAARDNADYSDVILTSEEEIKTTNPVATEEYGIVADNLQQQNTAPQIGTVNSQGALPGMVWQNRDVYLQGPIWAKIPHTDGNFHPSPLMGGFGLKHPPPQILIKNTPVPADPPTTFNQSKLNSFITQYSTGQVSVEIEWELQKENSKRWNPEIQYTSNYYKSTSVDFAVNTEGVYSEPHPIGTRYLTRPL

SEQ ID NO: 1056 - protein, 736 aa, synthetic construct
  REGION 1..736: note = source = /note="Description of Artificial Sequence: Synthetic polypeptide"
MAADGYLPDWLEDTLSEGIRQWWKLKPGPPPPKPAERHKDDSRGLVLPGYKYLGPFNGLDKGEPVNEADAAALEHDKAYDRQLDSGDNPYLKYNHADAEFQERLKEDTSFGGNLGRAVFQAKKRVLEPFGLVEEGAKTAPGKKRPVEQSPQEPDSSSGIGKTGQQPAKKRLNFGQTGDSESVPDPQPLGEPPATPAAVGPTTMASGGGAPMADNNEGADGVGNASGNWHCDSTWLGDRVITTSTRTWALPTYNNHLYKQISSTSTGASNDNHYFGYSTPWGYFDFNRFHCHFSPRDWQRLINNNWGFRPKRLNFKLFNIQVKEVTDNNGVKTIANNLTSTVQVFTDSEYQLPYVLGSAHQGCLPPFPADVFMIPQYGYLTLNNGSQAVGRSSFYCLEYFPSQMLRTGNNFTFSYTFEDVPFHSSYAHSQSLDRLMNPLIDQYLYYLSRTQTTGGTANTQTLGFSQGGPNTMANQAKNWLPGPCYRQQRVSTTTGQNNNSNFAWTAGTKYHLNGRNSLANPGIAMATHKDDKERFFPSNGILIFGKQNAARDNADYSDVMLTSEEEIKTTNPVATEEYGIVADNLQQQNTAPQIGTVNSQGALPGMVWQNRDVYLQGPIWAKIPHTDGNFHPSPLMGGFGLKHPPPQILIKNTPVPADPPTTFNQSKLNSFITQYSTGQVSVEIEWELQKENSKRWNPEIQYTSNYYKSTSVDFAVNTEGVYSEPHPIGTRYLTRPL

SEQ ID NO: 1057 - protein, 735 aa, synthetic construct
  REGION 1..735: note = source = /note="Description of Artificial Sequence: Synthetic polypeptide"
MAADGYLPDWLEDNLSEGIREWWDLKPGAPKPKANQQKQDDGRGLVLPGYKYLGPFNGLDKGEPVNAADAAALEHDKAYDRQLDSGDNPYLRYNHADAEFQERLKEDTSFGGNLGRAVFQAKKRVLEPFGLVEEGAKTAPGKKRPVEQSPQEPDSSSGIGKTGQQPAKKRLNFGQTGDSESVPDPQPLGEPPATPAAVGPTTMASGGGAPMADNNEGADGVGNASGNWHCDSTWLGDRVITTSTRTWALPTYNNHLYKQISSASTGASNDNHYFGYSTPWGYFDFNRFHCHFSPRDWQRLINNNWGFRPKRLNFKLFNIQVKEVTQNEGTKTIANNLTSTIQVFTDSEYQLPYVLGSAHQGCLPPFPADVFMIPQYGYLTLNNGSQAVGRSSFYCLEYFPSQMLRTGNNFQFTYTFEDVPFHSSYAHSQSLDRLMNPLIDQYLYYLSRTQTTGGTANTQTLGFSQGGPNTMANQAKNWLPGPCYRQQRVSTTTGQNNNSNFAWTAGTKYHLNGRNSLANPGIAMATHKDDRSVFFQYRDPDFGKQNAARDNADYSDVMLTSEEEIKTTNPVATEEYGIVADNLQQQNTAPQIGTVNSQGALPGMVWQNRDVYLQGPIWAKIPHTDGNFHPSPLMGGFGLKHPPPQILIKNTPVPADPPTTFNQSKLNSFITQYSTGQVSVEIEWELQKENSKRWNPEIQYTSNYYKSTSVDFAVNTEGVYSEPHPIGTRYLTRPL

SEQ ID NO: 1058 - protein, 736 aa, synthetic construct
  REGION 1..736: note = source = /note="Description of Artificial Sequence: Synthetic polypeptide"
MAADGYLPDWLEDNLSEGIREWWALKPGAPKPKANQQKQDDGRGLVLPGYKYLGPFNGLDKGEPVNAADAAALEHDKAYDQQLKAGDNPYLKYNHADAEFQERLQGDTSFGGNLGRAVFQAKKRVLEPLGLVEEAAKTAPGKKRPVEQSPQEPDSSAGIGKSGAQPAKKRLNFGQTGDTESVPDPQPLGEPPAAPSGVGPNTMAAGGGAPMADNNEGADGVGSSSGNWHCDSQWLGDRVITTSTRTWALPTYNNHLYKQISSASTGASNDNHYFGYSTPWGYFDFNRFHCHFSPRDWQRLINNNWGFRPKRLNFKLFNIQVKEVTDNNGVKTIANNLTSTVQVFTDSDYQLPYVLGSAHEGCLPPFPADVFMIPQYGYLTLNNGSQAVGRSSFYCLEYFPSQMLRTGNNFQFTYTFEDVPFHSSYAHSQSLDRLMNPLIDQYLYYLSRTQTTGGTANTQTLGFSQGGPNTMANQAKNWLPGPCYRQQRVSTTTGQNNNSNFAWTAGTKYHLNGRNSLANPGIAMATHKDDKERFFPSNGILIFGKQNAARDNADYSDVMLTSEEEIKTTNPVATEEYGIVADNLQQQNTAPQIGTVNSQGALPGMVWQNRDVYLQGPIWAKIPHTDGNFHPSPLMGGFGLKHPPPQILIKNTPVPADPPTTFNQSKLNSFITQYSTGQVSVEIEWELQKENSKRWNPEIQYTSNYYKSTSVDFAVNTEGVYSEPHPIGTRYLTRPL

SEQ ID NO: 1059 - protein, 736 aa, synthetic construct
  REGION 1..736: note = source = /note="Description of Artificial Sequence: Synthetic polypeptide"
MAADGYLPDWLEDTLSEGIRQWWKLKPGPPPPKPAERHKDDSRGLVLPGYKYLGPFNGLDKGEPVNEADAAALEHDKAYDRQLDSGDNPYLKYNHADAEFQERLKEDTSFGGNLGRAVFQAKKRVLEPFGLVEEAAKTAPGKKRPVEQSPQEPDSSSGIGKTGQQPAKKRLNFGQTGDSESVPDPQPLGEPPATPAAVGPTTMASGGGAPMADNNEGADGVGNASGNWHCDSTWLGDRVITTSTRTWALPTYNNHLYKQISSASTGASNDNHYFGYSTPWGYFDFNRFHCHFSPRDWQRLINNNWGFRPKRLNFKLFNIQVKEVTDNNGVKTIANNLTSTVQVFTDSDYQLPYVLGSAHEGCLPPFPADVFMIPQYGYLTLNNGSQAVGRSSFYCLEYFPSQMLRTGNNFTFSYTFEDVPFHSSYAHSQSLDRLMNPLIDQYLYYLSRTQTTGGTANTQTLGFSQGGPNTMANQAKNWLPGPCYRQQRVSTTTGQNNNSNFAWTAGTKYHLNGRNSLANPGIAMATHKDDKERFFPSNGILIFGKQNAARDNADYSDVMLTSEEEIKTTNPVATEEYGIVADNLQQQNTAPQIGTVNSQGALPGMVWQNRDVYLQGPIWAKIPHTDGNFHPSPLMGGFGLKHPPPQILIKNTPVPADPPTTFNQSKLNSFITQYSTGQVSVEIEWELQKENSKRWNPEIQYTSNYYKSTSVDFAVNTEGVYSEPHPIGTRYLTRPL

SEQ ID NO: 1060 - protein, 736 aa, synthetic construct
  REGION 1..736: note = source = /note="Description of Artificial Sequence: Synthetic polypeptide"
MAADGYLPDWLEDNLSEGIREWWALKPGAPKPKANQQKQDDGRGLVLPGYKYLGPFNGLDKGEPVNAADAAALEHDKAYDQQLKAGDNPYLRYNHADAEFQERLQEDTSFGGNLGRAVFQAKKRVLEPLGLVEEGAKTAPGKKRPVEQSPQEPDSSSGIGKTGQQPAKKRLNFGQTGDSESVPDPQPLGEPPATPAAVGPTTMASGGGAPMADNNEGADGVGSSSGNWHCDSTWLGDRVITTSTRTWALPTYNNHLYKQISSASTGASNDNHYFGYSTPWGYFDFNRFHCHFSPRDWQRLINNNWGFRPKRLNFKLFNIQVKEVTDNNGVKTIANNLTSTVQVFTDSEYQLPYVLGSAHQGCLPPFPADVFMIPQYGYLTLNNGSQAVGRSSFYCLEYFPSQMLRTGNNFTFSYTFEDVPFHSSYAHSQSLDRLMNPLIDQYLYYLSRTQTTGGTANTQTLGFSQGGPNTMANQAKNWLPGPCYRQQRVSTTTGQNNNSNFAWTAGTKYHLNGRNSLANPGIAMATHKDDKERFFPSNGILIFGKQNAARDNADYSDVMLTSEEEIKTTNPVATEEYGIVADNLQQQNTAPQIGTVNSQGALPGMVWQNRDVYLQGPIWAKIPHTDGNFHPSPLMGGFGLKHPPPQILIKNTPVPADPPTTFNQSKLNSFITQYSTGQVSVEIEWELQKENSKRWNPEIQYTSNYYKSTSVDFAVNTEGVYSEPHPIGTRYLTRPL

SEQ ID NO: 1061 - protein, 737 aa, synthetic construct
  REGION 1..737: note = source = /note="Description of Artificial Sequence: Synthetic polypeptide"
MAADGYLPDWLEDNLSEGIREWWALKPGAPKPKANQQKQDDGRGLVLPGYKYLGPFNGLDKGEPVNAADAAALEHDKAYDQQLKAGDNPYLRYNHADAEFQERLQEDTSFGGNLGRAVFQAKKRVLEPLGLVEEGAKTAPGKKRPVEQSPQEPDSSSGIGKTGQQPAKKRLNFGQTGDTESVPDPQPIGEPPAAPSGVGSLTMASGGGAPVADNNEGADGVGSSSGNWHCDSQWLGDRVITTSTRTWALPTYNNHLYKQISNSTSGGSSNDNAYFGYSTPWGYFDFNRFHCHFSPRDWQRLINNNWGFRPKRLNFKLFNIQVKEVTQNEGTKTIANNLTSTIQVFTDSEYQLPYVLGSAHQGCLPPFPADVFMIPQYGYLTLNNGSQAVGRSSFYCLEYFPSQMLRTGNNFQFTYTFEDVPFHSSYAHSQSLDRLMNPLIDQYLYYLSRTQTTGGTANTQTLGFSQGGPNTMANQAKNWLPGPCYRQQRVSTTTGQNNNSNFAWTAGTKYHLNGRNSLANPGIAMATHKDDKERFFPSNGILIFGKQNAARDNADYSDVMLTSEEEIKTTNPVATEEYGIVADNLQQQNTAPQIGTVNSQGALPGMVWQNRDVYLQGPIWAKIPHTDGNFHPSPLMGGFGLKHPPPQILIKNTPVPADPPTTFNQSKLNSFITQYSTGQVSVEIEWELQKENSKRWNPEIQYTSNYYKSTSVDFAVNTEGVYSEPHPIGTRYLTRPL

SEQ ID NO: 1062 - protein, 736 aa, synthetic construct
  REGION 1..736: note = source = /note="Description of Artificial Sequence: Synthetic polypeptide"
MAADGYLPDWLEDNLSEGIREWWALKPGAPKPKANQQKQDDGRGLVLPGYKYLGPFNGLDKGEPVNAADAAALEHDKAYDQQLKAGDNPYLKYNHADAEFQERLQGDTSFGGNLGRAVFQAKKRVLEPLGLVEEAAKTAPGKKRPVEQSPQEPDSSAGIGKSGAQPAKKRLNFGQTGDTESVPDPQPLGEPPAAPSGVGPNTMAAGGGAPMADNNEGADGVGSSSGNWHCDSQWLGDRVITTSTRTWALPTYNNHLYKQISSASTGASNDNHYFGYSTPWGYFDFNRFHCHFSPRDWQRLINNNWGFRPKRLNFKLFNIQVKEVTDNNGVKTIANNLTSTVQVFTDSEYQLPYVLGSAHQGCLPPFPADVFMIPQYGYLTLNNGSQAVGRSSFYCLEYFPSQMLRTGNNFTFSYTFEDVPFHSSYAHSQSLDRLMNPLIDQYLYYLSRTQTTGGTANTQTLGFSQGGPNTMANQAKNWLPGPCYRQQRVSTTTGQNNNSNFAWTAGTKYHLNGRNSLANPGIAMATHKDDKERFFPSNGILIFDKQNAARDNADYSDVMLTSEEEIKTTNPVATEEYGIVADNLQQQNTAPQIGTVNSQGALPGMVWQNRDVYLQGPIWAKIPHTDGNFHPSPLMGGFGLKHPPPQILIKNTPVPADPPTTFNQSKLNSFITQYSTGQVSVEIEWELQKENSKRWNPEIQYTSNYYKSTSVDFAVNTEGVYSEPHPIGTRYLTRPL

SEQ ID NO: 1063 - protein, 736 aa, synthetic construct
  REGION 1..736: note = source = /note="Description of Artificial Sequence: Synthetic polypeptide"
MAADGYLPDWLEDTLSEGIRQWWKLKPGPPPPKPAERHKDDSRGLVLPGYKYLGPFNGLDKGEPVNEADAAALEHDKAYDRQLDSGDNPYLKYNHADAEFQERLKEDTSFGGNLGRAVFQAKKRVLEPLGLVEEPVKTAPGKKRPVEHSPVEPDSSSGTGKAGQQPARKRLNFGQTGDSESVPDPQPLGEPPATPAAVGPNTMATGSGAPMADNNEGADGVGNSSGNWHCDSTWMGDRVITTSTRTWALPTYNNHLYKQISSASTGASNDNHYFGYSTPWGYFDFNRFHCHFSPRDWQRLINNNWGFRPKRLNFKLFNIQVKEVTDNNGVKTIANNLTSTIQVFTDSEYQLPYVLGSAHQGCLPPFPADVFMIPQYGYLTLNNGSQAVGRSSFYCLEYFPSQMLRTGNNFTFSYTFEDVPFHSSYAHSQSLDRLMNPLIDQYLYYLSRTQTTGGKANTQTLGFSQGGPNTMANQAKNWLPGPCYRQQRVSTTTGQNNNSNFAWTAGTKYHLNGRNSLANPGIAMATHKDDKERFFPSNGILIFGKQNAARDNADYSDVMLTSEEEIKTTNPVATEEYGIVADNLQQQNTAPQIGTVNSQGALPGMVWQNRDVYLQGPIWAKIPHTDGNFHPSPLMGGFGLKHPPPQILIKNTPVPADPPTTFNQSKLNSFITQYSTGQVSVEIEWELQKENSKRWNPEIQYTSNYYKSTSVDFAVNTEGVYSEPHPIGTRYLTRPL

SEQ ID NO: 1064 - protein, 736 aa, synthetic construct
  REGION 1..736: note = source = /note="Description of Artificial Sequence: Synthetic polypeptide"
MAADGYLPDWLEDNLSEGIREWWALKPGAPKPKANQQKQDDGRGLVLPGYKYLGPFNGLDKGEPVNAADAAALEHDKAYDQQLKAGDNPYLRYNHADAEFQERLQEDTSFGGNLGRAVFQAKKRVLEPFGLVEEGAKTAPGKKRPVEQSPQEPDSSSGIGKTGQQPAKKRLNFGQTGDSESVPDPQPLGEPPATPAAVGPTTMASGGGAPMADNNEGADGVGNASGNWHCDSTWLGDRVITTSTRTWALPTYNNHLYKQISSASTGASNDNHYFGYSTPWGYFDFNRFHCHFSPRDWQRLINNNWGFRPKRLNFKLFNIQVKEVTDNNGVKTIANNLTSTVQVFTDSEYQLPYVLGSAHQGCLPPFPADVFMIPQYGYLTLNNGSQAVGRSSFYCLEYFPSQMLRTGNNFTFSYTFEDVPFHSSYAHSQSLDRLMNPLIDQYLYYLSRTQTTGGTGNTQTLGFSQGGPNTMANQAKNWLPGPCYRQQRVSTTTGQNNNSNFAWTAGTKYHLNGRNSLANPGIAMATHKDDKERFFPSNGILIFGKQNAARDNADYSDVMLTSEEEIKTTNPVATEEYGIVADNLQQQNTAPQIGTVNSQGALPGMVWQNRDVYLQGPIWAKIPHTDGNFHPSPLMGGFGLKHPPPQILIKNTPVPADPPTTFNQSKLNSFITQYSTGQVSVEIEWELQKENSKRWNPEIQYTSNYYKSTSVDFAVNTEGVYSEPHPIGTRYLTRPL

SEQ ID NO: 1065 - protein, 736 aa, synthetic construct
  REGION 1..736: note = source = /note="Description of Artificial Sequence: Synthetic polypeptide"
MAADGYLPDWLEDNLSEGIREWWDLKPGAPKPKANQQKQDDGRGLVLPGYKYLGPFNGLDKGEPVNAADAAALEHDKAYDQQLKAGDNPYLRYNHADAEFQERLQEDTSFGGNLGRAVFQAKKRVLEPLGLVEEGAKTAPGKKRPVEQSPQEPDSSSGIGKTGQQPAKKRLNFGQTGDSESVPDPQPLGEPPATPAAVGPTTMASGGGAPMADNNEGADGVGSSSGNWHCDSTWLGDRVITTSTRTWALPTYNNHLYKQISSASTGASNDNHYFGYSTPWGYFDFNRFHCHFSPRDWQRLINNNWGFRPKRLNFKLFNIQVKEVTQNEGTKTIANNLTSTIQVFTDSEYQLPYVLGSAHQGCLPPFPADVFMIPQYGYLTLNNGSQAVGRSSFYCLEYFPSQMLRTGNNFTFSYTFEDVPFHSSYAHSQSLDRLMNPLIDQYLYYLSRTQTTGGTANTQTLGFSQGGPNTMANQAKNWLPGPCYRQQRVSTTTGQNNNSNFAWTAGTKYHLNGRNSLANPGIAMATHKDDKERFFPSNGILIFGKQNAARDNADYSDVMLTSEEEIKTTNPVATEEYGIVADNLQQQNTAPQIGTVNSQGALPGMVWQNRDVYLQGPIWAKIPHTDGNFHPSPLMGGFGLKHPPPQILIKNTPVPADPPTTFNQSKLNSFITQYSTGQVSVEIEWELQKENSKRWNPEIQYTSNYYKSTSVDFAVNTEGVYSEPHPIGTRYLTRPL

SEQ ID NO: 1066 - protein, 736 aa, synthetic construct
  REGION 1..736: note = source = /note="Description of Artificial Sequence: Synthetic polypeptide"
MAADGYLPDWLEDNLSEGIREWWALKPGAPKPKANQQKQDDGRGLVLPGYKYLGPFNGLDKGEPVNAADAAALEHDKAYDQQLKAGDNPYLRYNHADAEFQERLQEDTSFGGNLGRAVFQAKKRVLEPLGLVEEGAKTAPGKKRPVEQSPQEPDSSSGIGKTGQQPAKKRLNFGQTGDSESVPDPQPLGEPPATPAAVGPTTMAAGGGAPMADNNEGADGVGSSSGNWHCDSTWMGDRVITTSTRTWALPTYNNHLYKQISSASTGASNDNHYFGYSTPWGYFDFNRFHCHFSPRDWQRLINNNWGFRPKRLSFKLFNIQVKEVTQNEGTKTIANNLTSTIQVFTDSEYQLPYVLGSAHQGCLPPFPADVFMIPQYGYLTLNNGSQAVGRSSFYCLEYFPSQMLRTGNNFTFSYTFEDVPFHSSYAHSQSLDRLMNPLIDQYLYYLSRTQTTGGTANTQTLGFSQGGPNTMANQAKNWLQGPCYRQQRVSTTTGQNNNSNFAWTAGTKYHLNGRNSLANPGIAMATHKDDKERFFPSNGILIFGKQNAARDNADYSDVMLTSEEEIKTTNPVATEEYGIVADNLQQQNTAPQIGTVNSQGALPGMVWQNLDVYLQGPIWAKIPHTDGNFHPSPLMGGFGLKHPPPQILIKNTPVPADPPTTFNQSKLNSFITQYSTGQVSVEIEWELQKENSKRWNPEIQYTSNYYKSTSVDFAVNTEGVYSEPHPIGTRYLTRPL

SEQ ID NO: 1067 - protein, 737 aa, synthetic construct
  REGION 1..737: note = source = /note="Description of Artificial Sequence: Synthetic polypeptide"
MAADGYLPDWLEDNLSEGIREWWALKPGAPKPKANQQKQDDGRGLVLPGYKYLGPFNGLDKGEPVNAADAAALEHDKAYDQQLKAGDNPYLRYNHADAEFQERLQEDTSFGGNLGRAVFQAKKRVLEPLGLVEEGAKTAPGKKRPVEPSPQRSPDSSSGIGKTGQQPAKKRLNFGQTGDSESVPDPQPLGEPPATPAAVGPTTMASGGGAPMADNNEGADGVGNASGNWHCDSQWLGDRVITTSTRTWALPTYNNHLYKQISSASTGASNDNHYFGYSTPWGYFDFNRFHCHFSPRDWQRLINNNWGFRPKRLNFKLFNIQVKEVTDNNGVKTIANNLTSTVQVFTDSDYQLPYVLGSAHEGCLPPFPADVFMIPQYGYLTLNNGSQAVGRSSFYCLEYFPSQMLRTGNNFQFTYTFEDVPFHSSYAHSQSLDRLMNPLIDQYLYYLSRTQTTGGTANTQTLGFSQGGPNTMANQAKNWVPGPCYRQQRVSTATGQNNNSNFAWTAGTKYHLKGRNSLANPGIAMATHKDDKERFFPSNGILIFGKQNAARDNADYSDVMLTSEEEIKTTNPVATEEYGIVADNLQQQNTAPQIGTVNSQGALPGMVWQNRDVYLQGPIWAKIPHTDGNFHPSPLMGGFGLKHPPPQILIKNTPVPADPPTTFNQSKLNSFITQYSTGQVSVEIEWELQKENSKRWNPEIQYTSNYYKSTSVDFAVNTEGVYSEPHPIGTRYLTRPL

SEQ ID NO: 1068 - protein, 737 aa, synthetic construct
  VARIANT 226: note = MOD_RES - Any naturally occurring amino acid
  VARIANT 233: note = MOD_RES - Any naturally occurring amino acid
  VARIANT 239: note = MOD_RES - Any naturally occurring amino acid
  VARIANT 250: note = MOD_RES - Any naturally occurring amino acid
  VARIANT 253: note = MOD_RES - Any naturally occurring amino acid
  VARIANT 255: note = MOD_RES - Any naturally occurring amino acid
  REGION 1..737: note = source = /note="Description of Artificial Sequence: Synthetic polypeptide"
MAADGYLPDWLEDTLSEGIRQWWKLKPGPPPPKPAERHKDDSRGLVLPGYKYLGPFNGLDKGEPVNEADAAALEHDKAYDRQLDSGDNPYLKYNHADAEFQERLKEDTSFGGNLGRAVFQAKKRVLEPLGLVEEGAKTAPGKKRPVEQSPQEPDSSSGIGKTGQQPAKKRLNFGQTGDSESVPDPQPLGEPPATPSGVGPNTMAAGGGAPMADNNEGADGVGSSSXNWHCDSXWLGDRXITTSTRTWALXTYXNXLYKQISNSTSGGATNDNTYFGYSTPWGYFDFNRFHCHFSPRDWQRLINNNWGFRPKRLNFKLFNIQVKEVTQNEGTKTIANNLTSTIQVFTDSEYQLPYVLGSAHQGCLPPFPADVFMIPQYGYLTLNNGSQAVGRSSFYCLEYFPSQMLRTGNNFQFTYTFEDVPFHSSYAHSQSLDRLMNPLIDQYLYYLSRTQTTGGTANTQTLGFSQGGPNTMANQAKNWLPGPCYRQQRVSTTTGQNNNSNFAWTAGTKYHLNGRNSLANPGIAMATHKDDKERFFPSNGILIFGKQNAARDNADYSDVMLTSEEEIKTTNPVATEEYGIVADNLQQQNTAPQIGTVNSQGALPGMVWQNRDVYLQGPIWAKIPHTDGNFHPSPLMGGFGLKHPPPQILIKNTPVPADPPTTFSQAKLASFITQYSTGQVSVEIEWELQKENSKRWNPEVQYTSNYAKSANVDFTVDNNGLYTEPRPIGTRYLTRPL

SEQ ID NO: 1069 - protein, 737 aa, synthetic construct
  REGION 1..737: note = source = /note="Description of Artificial Sequence: Synthetic polypeptide"
MAADGYLPDWLEDNLSEGIREWWDLKPGAPKPKANQQKQDDGRGLVLPGYKYLGPFNGLDKGEPVNAADAAALEHDKAYDQQLKAGDNPYLRYNHADAEFQERLQEDTSFGGNLGRAVFQAKKRVLEPLGLVEEGAKTAPGKKRPVEPSPQRSPDSSTGIGKKGQQPAKKRLNFGQTGDSESVPDPQPIGEPPAGPSGVGSLTMASGGGAPVADNNEGADGVGSSSGNWHCDSQWLGDRVITTSTRTWALPTYNNHLYKQISSASTGASNDNHYFGYSTPWGYFDFNRFHCHFSPRDWQRLINNNWGFRPKRLNFKLFNIQVKEVTDNDGVKTIANNLTSTIQVFTDSEYQLPYVLGSAHQGCLPPFPADVFMIPQYGYLTLNNGSQAVGRSSFYCLEYFPSQMLRTGNNFTFSYTFEDVPFHSSYAHSQSLDRLMNPLIDQYLYYLSRTQTTGGTANTQTLGFSQGGPNTMANHAKNWLPGPCYRQQRVSTTTGQNNNSNFAWTAGTKYHLNGRNSLANPGIAMATHKDDKERFFPSNGILIFGKQNAARDNADYSDVMLTSEEEIKTTNPVATEEYGIVADNLQQQNTAPQIGTVNSQGALPGMVWQNRDVYLQGPIWAKIPHTDGNFHPSPLMGGFGLKHPPPQILIKNTPVPADPPTTFNQSKLNSFITQYSTGQVSVEIEWELQKENSKRWNPEIQYTSNYYKSTSVDFAVNTEGVYSEPHPIGTRYLTRPL

SEQ ID NO: 1070 - protein, 736 aa, synthetic construct
  REGION 1..736: note = source = /note="Description of Artificial Sequence: Synthetic polypeptide"
MAADGYLPDWLEDTLSEGIRQWWKLKPGPPPPKPAERHKDDSRGLVLPGYKYLGPFNGLDKGEPVNEADAAALEHDKAYDRQLDSGDNPYLKYNHADAEFQERLKEDTSFGGNLGRAVFQAKKRVLEPLGLVEEPVKTAPGKKRPVEHSPVEPDSSSGTGKAGQQPAKKRLNFGQTGDSESVPDPQPLGEPPATPAAVGPTTMASGGGAPMADNNEGADGVGNASGNWHCDSTWLGDRVITTSTRTWALPTYNNHLYKQISSASTGASNDNHYFGYSTPWGYFDFNRFHCHFSPRDWQRLINNNWGFRPKRLNFKLFNIQVKEVTQNEGTKTIANNLTSTIQVFTDSEYQLPYVLGSAHQGCLPPFPADVFMIPQYGYLTLNNGSQAVGRSSFYCLEYFPSQMLRTGNNFQFTYTFEDVPFHSSYAHSQSLDRLMNPLIDQYLYYLSRTQTTGGTANTQTLGFSQGGPNTMANQAKNWLPGPCYRQQRVSTTTGQNNNSNFAWTAGTKYHLNGRNSLANPGIAMATHKDDKERFFPSNGILIFGKQNAARDNADYSDVMLTSEEEIKTTNPVATEEYGIVADNLQQQNTAPQIGTVNSQGALPGMVWQNRDVYLQGPIWAKIPHTDGNFHPSPLMGGFGLKHPPPQILIKNTPVPADPPTTFNQSKLNSFITQYSTGQVSVEIEWELQKENSKRWNPEIQYTSNYYKSTSVDFAVNTEGVYSEPHPIGTRYLTRPL

SEQ ID NO: 1071 - protein, 736 aa, synthetic construct
  REGION 1..736: note = source = /note="Description of Artificial Sequence: Synthetic polypeptide"
MAADGYLPDWLEDNLSEGIREWWALKPGAPKPKANQQKQDDGRGLVLPGYKYLGPFNGLDKGEPVNAADAAALEHDKAYDQQLQAGDNPYLRYNHADAEFQERLQGDTSFGGNLGRAVFQAKKRVLEPLGLVEEGAKTAPGKKRPVEQSPQEPDSSSGIGKTGQQPAKKRLNFGQTGDSESVPDPQPLGEPPATPAAVGPTTMASGGGAPMADNNEGADGVGNASGNWHCDSTWLGDRVITTSTRTWALPTYNNHLYKQISSASTGASNDNHYFGYSTPWGYFDFNRFHCHFSPRDWQRLINNNWGFRPKRLNFKLFNIQVKEVTDNNGVKTIANNLTSTIQVFTDSEYQLPYVLGSAHQGCLPPFPADVFMIPQYGYLTLNNGSQAVGRSSFYCLEYFPSQMLRTGNNFQFTYTFEDVPFHSSYAHSQSLDRLMNPLIDQYLYYLSRTQTTGGTANTQTLGFSQGGPNTMANQAKNWLPGPCYRQQRVSTTTGQNNNSNFAWTAGTKYHLNGRNSLANPGIAMATHKDDKERFFPSNGILIFGKQNAARDNADYSDVMLTSEEEIKTTNPVATEEYGIVADNLQQQNTAPQIGTVNSQGALPGMVWQNRDVYLQGPIWAKIPHTDGNFHPSPLMGGFGLKHPPPQILIKNTPVPADPPTTFNQSKLNSFITQYSTGQVSVEIEWELQKENSKRWNPEIQYTSNYYKSTSVDFAVNTEGVYSEPHPIGTRYLTRPL

SEQ ID NO: 1072 - protein, 738 aa, synthetic construct
  REGION 1..738: note = source = /note="Description of Artificial Sequence: Synthetic polypeptide"
MAADGYLPDWLEDTLSEGIRQWWKLKPGPPPPKPAERHKDDSRGLVLPGYKYLGPFNGLDKGEPVNAADAAALEHDKAYDQQLKAGDNPYLRYNHADAEFQERLKEDTSFGGNLGRAVFQAKKRVLEPLGLVEEGAKTAPGKKRPVEPSPQRSPDSSTGIGKKGQQPARKRLNFGQTGDSESVPDPQPLGEPPAAPSGVGPNTMAAGGGAPMADNNEGADGVGSSSGNWHCDSQWLGDRVITTSTRTWALPTYNNHLYKQISNSTSGGSSNDNAYFGYSTPWGYFDFNRFHCHFSPRDWQRLINNNWGFRPKRLNFKLFNIQVKEVTDNNGVKTIANNLTSTVQVFTDSEYQLPYVLGSAHQGCLPPFPADVFMIPQYGYLTLNNGSQAVGRSSFYCLEYFPSQMLRTGNNFTFSYTFEDVPFHSSYAHSQSLDRLMNPLIDQYLYYLSRTQTTGGTANTQTLGFSQGGPNTMANQAKNWLPGPCYRQQRVSTTTGQNNNSNFAWTAGTKYHLNGRNSLANPGIAMATHKDDKERFFPSNGILIFGKQNAARDNADYSDVMLTSEEEIKTTNPVATEEYGIVADNLQQQNTAPQIGTVNSQGALPGMVWQNRDVYLQGPIWAKIPHTDGHFHPSPLMGGFGLKHPPPQILIKNTPVPANPPTTFNQSKLNSFITQYSTGQVSVEIEWELQKENSKRWNPEVQYTSNYAKSANVDFTVDNNGLYTEPRPIGTRYLTRPL

SEQ ID NO: 1073 - protein, 738 aa, synthetic construct; identical to SEQ ID NO: 1072
  REGION 1..738: note = source = /note="Description of Artificial Sequence: Synthetic polypeptide"

SEQ ID NO: 1074 - protein, 736 aa, synthetic construct
  REGION 1..736: note = source = /note="Description of Artificial Sequence: Synthetic polypeptide"
MAADGYLPDWLEDNLSEGIREWWALKPGAPKPKANQQKQDDGRGLVLPGYKYLGPFNGLDKGEPVNAADAAALEHDKAYDQQLKAGDNPYLRYNHADAEFQERLQEDTSFGGNLGRAVFQAKKRLLEPLGLVEEGAKTAPGKKRPVEQSPQEPDSSSGIGKTGQQPAKKRLNFGQTGDSESVPDPQPLGEPPATPAAVGPTTMASGGGAPMADNNEGADGVGNSSGNWHCDSTWMGDRVITTSTRTWALPTYNNHLYKQISSASTGASNDNHYFGYSTPWGYFDFNRFHCHFSPRDWQRLINNNWGFRPKRLNFKLFNIQVKEVTQNEGTKTIANNLTSTIQVFTDSEYQLPYVLGSAHQGCLPPFPADVFIIPQYGYLTLNNGSQAVGRSSFYCLEYFPSQMLRTGNNFTFSYTFEDVPFHSSYAHSQSLDRLMNPLIDQYLYYLSRTQTTGGTANTQTLGFSQGGPNTMANQAKNWLPGPCYRQQRVSTTTGQNNNSNFAWTAGTKYHLNGRNSLANPGIAMATHKDDKERFFPSNGILIFGKQNAARDNADYSDVMLTSEEEIKTTNPVATEEYGIVADNLQQQNTAPQIGTVNSQGALPGMVWQNRDVYLQGPIWAKIPHTDGNFHPSPLMGGFGLKHPPPQILIKNTPVPADPPTTFNQSKLNSFITQYSTGQVSVEIEWELQKENSKRWNPEIQYTSNYYKSTSVDFAVNTEGVYSEPHPIGTRYLTRPL

SEQ ID NO: 1075 - protein, 736 aa, synthetic construct
  REGION 1..736: note = source = /note="Description of Artificial Sequence: Synthetic polypeptide"
MAADGYLPDWLEDNLSEGIREWWALKPGAPKPKANQQKQDDGRGLVLPGYKYLGPFNGLDKGEPVNAADAAALEHDKAYDQQLKAGDNPYLRYNHADAEFQERLQEDTSFGGNLGRAVFQAKKRVLEPFGLVEEAAKTAPGKKRPVEQSPQEPDSSSGIGKTGQQPAKKRLNFGQTGDSESVPDPQPLGEPPATPAAVGPTTMASGGGAPMADNNEGADGVGNASGNWHCDSTWLGDRVITTSTRTWALPTYNNHLYKQISSASTGASNDNHYFGYSTPWGYFDFNRFHCHFSPRDWQRLINNNWGFRPKRLNFKLFNIQVKEVTQNEGTKTIANNLTSTIQVFTDSEYQLPYVLGSAHQGCLPPFPADVFMIPQYGYLTLNNGSQAVGRSSFYCLEYFPSQMLRTGNNFTFSYTFEDVPFHSSYAHSQSLDRLMNPLIDQYLYYLSRTQTTGGTANTQTLGFSQGGPNTMANHAKNWLPGPCYRQQRVSTTTGQNNNSNFAWTAGTKYHLNGRNSLANPGIAMATHKDDKERFFPSNGILIFGKQNAARDNADYSDVMLTSEEEIKTTNPVATEEYGIVADNLQQQNTAPQIGTVNSQGALPGMVWQNRDVYLQGPIWAKIPHTDGNFHPSPLMGGFGLKHPPPQILIKNTPVPADPPTTFNQSKLNSFITQYSTGQVSVEIEWELQKENSKRWNPEIQYTSNYYKSTSVDFAVNTEGVYSEPHPIGTRYLTRPL

SEQ ID NO: 1076 - protein, 736 aa, synthetic construct
  REGION 1..736: note = source = /note="Description of Artificial Sequence: Synthetic polypeptide"
MAADGYLPDWLEDNLSEGIREWWALKPGAPKPKANQQKQDDGRGLVLPGYKYLGPFNGLDKGEPVNEADAAALEHDKAYDQQLKAGDNPYLRYNHADAEFQERLQEDTSFGGNLGRAVFQAKKRLLEPLGLVEEAAKTAPGKKRPVEQSPQEPDSSAGIGKSGAQPAKKRLNFGQTGDSESVPDPQPLGEPPATPAAVGPTTMASGGGAPMADNNEGADGVGNASGNWHCDSTWLGDRVITTSTRTWALPTYNNHLYKQISSASTGASNDNHYFGYSTPWGYFDFNRFHCHFSPRDWQRLINNNWGFRPKRLNFKLFNIQVKEVTDNDGVKTIANNLTSTIQVFTDSEYQLPYVLGSAHQGCLPPFPADVFMIPQYGYLTLNNGSQAVGRSSFYCLEYFPSQMLRTGNNFQFTYTFEDVPFHSSYAHSQSLDRLMNPLIDQYLYYLSRTQTTGGTANTQTLGFSQGGPNTMANQAKNWLPGPCYRQQRVSTTTGQNNNSNFAWTAGTKYHLNGRNSLANPGIAMATHKDDKERFFPSNGILIFGKQNAARDNADYSDVMLTSEEEIKTTNPVATEEYGIVADNLQQQNTAPQIGTVNSQGALPGMVWQNRDVYLQGPIWAKIPHTDGNFHPSPLMGGFGLKHPPPQILIKNTPVPADPPTTFNQSKLNSFITQYSTGQVSVEIEWELQKENSKRWNPEIQYTSNYYKSTSVDFAVNTEGVYSEPHPIGTRYLTRPL

SEQ ID NO: 1077 - protein, 736 aa, synthetic construct
  REGION 1..736: note = source = /note="Description of Artificial Sequence: Synthetic polypeptide"
MAADGYLPDWLEDNLSEGIREWWALKPGAPKPKANQQKQDDGRGLVLPGYKYLGPFNGLDKGEPVNAADAAALEHDKAYDQQLKAGDNPYLRYNHADAEFQERLQEDTSFGGNLGRAVFQAKKRVLEPLGLVEEGAKTAPGKKRPVEQSPQEPDSSAGIGKTGAQPAKKRLNFGQTGDSESVPDPQPLGEPPATPAAVGPTTMASGGGAPMADNNEGADGVGSASGNWHCDSTWLGDRVITTSTRTWALPTYNNHLYKQISSASTGASNDNHYFGYSTPWGYFDFNRFHCHFSPRDWQRLINNNWGFRPKRLNFKLFNIQVKEVTDNNGVKTIANNLTSTIQVFTDSEYQLPYVLGSAHQGCLPPFPADVFMIPQYGYLTLNNGSQAVGRSSFYCLEYFPSQMLRTGNNFTFSYTFEDVPFHSSYAHSQSLDRLMNPLIDQYLYYLSRTQTTGGTANTQTLGFSQGGPNTMANQAKNWLPGPCYRQQRVSTTTGQNNNSNFAWTAGTKYHLNGRNSLANPGIAMATHKDDKERFFPSNGILIFGKQNAARDNADYSDVMLTSEEEIKTTNPVATEEYGIVADNLQQQNTAPQIGTVNSQGALPGMVWQNRDVYLQGPIWAKIPHTDGNFHPSPLMGGFGLKHPPPQILIKNTPVPADPPTTFNQSKLNSFITQYSTGQVSVEIEWELQKENSKRWNPEIQYTSNYYKSTSVDFAVNTEGVYSEPHPIGTRYLTRPL

SEQ ID NO: 1078 - protein, 736 aa, synthetic construct
  REGION 1..736: note = source = /note="Description of Artificial Sequence: Synthetic polypeptide"
MAADGYLPDWLEDNLSEGIREWWDLKPGAPKPKANQQKQDDGRGLVLPGYKYLGPFNGLDKGEPVNAADAAALEHDKAYDQQLKAGDNPYLRYNHADAEFQERLQEDTSFGGNLGRAVFQAKKRLLEPLGLVEEAAKTAPGKKRPVEQSPQEPDSSAGIGKSGAQPAKKRLNFGQTGDTESVPDPQPIGEPPAAPSGVGPNTMAAGGGAPMADNNEGADGVGSSSGNWHCDSQWLGDRVITTSTRTWALPTYNNHLYKQISSASTGASNDNHYFGYSTPWGYFDFNRFHCHFSPRDWQRLINNNWGFRPKRLNFKLFNIQVKEVTQNEGTKTIANNLTSTIQVFTDSEYQLPYVLGSAHQGCLPPFPADVFMIPQYGYLTLNNGSQAVGRSSFYCLEYFPSQMLRTGNNFQFTYTFEDVPFHSSYAHSQSLDRLMNPLIDQYLYYLSRTQTTGGTANTQTLGFSQGGPNTMANHAKNWLPGPCYRQQRVSTTTGQNNNSNFAWTAGTKYHLNGRNSLANPGIAMATHKDDKERFFPSNGILIFGKQNAARDNADYSDVMLTSEEEIKTTNPVATEEYGIVADNLQQQNTAPQIGTVNSQGALPGMVWQNRDVYLQGPIWAKIPHTDGNFHPSPLMGGFGLKHPPPQILIKNTPVPADPPTTFNQSKLNSFITQYSTGQVSVEIEWELQKENSKRWNPEIQYTSNYYKSTSVDFAVNTEGVYSEPHPIGTRYLTRPL

SEQ ID NO: 1079 - protein, 737 aa, synthetic construct; identical to SEQ ID NO: 1061
  REGION 1..737: note = source = /note="Description of Artificial Sequence: Synthetic polypeptide"

SEQ ID NO: 1080 - protein, 737 aa, synthetic construct
  REGION 1..737: note = source = /note="Description of Artificial Sequence: Synthetic polypeptide"
MAADGYLPDWLEDNLSEGIREWWALKPGAPKPKANQQKQDDGRGLVLPGYKYLGPFNGLDKGEPVNAADAAALEHDKAYDQQLKAGDNPYLRYNHADAEFQERLKEDTSFGGNLGRAVFQAKKRVLEPFGLVEEGAKTAPGKKRPVEQSPQEPDSSSGIGKTGQQPAKKRLNFGQTGDSESVPDPQPLGEPPAAPSGVGPNTMAAGGGAPMADNNEGADGVGSSSGNWHCDSQWLGNRVITTSTRTWALPTYNNHLYKQISNSTSGGSSNDNAYFGYSTPWGYFDFNRFHCHFSPRDWQRLINNNWGFRPKRLNFKLFNIQVKEVTDNNGVKTIANNLTSTVQVFTDSEYQLPYVLGSAHQGCLPPFPADVFMIPQYGYLTLNNGSQAVGRSSFYCLEYFPSQMLRTGNNFQFTYTFEDVPFHSSYAHSQSLDRLMNPLIDQYLYYLSRTQTTGGTANTQTLGFSQGGPNTMANQAKNWLPGPCYRQQRVSTTTGQNNNSNFAWTAGTKYHLNGRNSLANPGIAMATHKDDKERFFPSNGILIFGKQNAARDNADYSDVMLTSEEEIKTTNPVATEEYGIVADNLQQQNTAPQIGTVNSQGALPGMVWQNRDVYLQGPIWAKIPHTDGNFHPSPLMGGFGLKHPPPQILIKNTPVPADPPTTFNQSKLNSFITQYSTGQVSVEIEWELQKENSKRWNPEIQYTSNYYKSTSVDFAVNTEGVYSEPHPIGTRYLTRPL

SEQ ID NO: 1081 - protein, 736 aa, synthetic construct
  REGION 1..736: note = source = /note="Description of Artificial Sequence: Synthetic polypeptide"
MAADGYLPDWLEDNLSEGIREWWDLKPGAPKPKANQQKQDDGRGLVLPGYKYLGPFNGLDRGEPVNAADAAALEHDKAYDQQLKAGDNPYLRYNHADAEFQERLQEDTSFGGNLGRAVFQAKKRVLEPLGLVEEGAKTAPGKKRPVEQSPQEPDSSSGIGKTGQQPAKKRLNFGQTGDSESVPDPQPLGEPPATPAAVGPTTMASGGGAPMADNNEGADGVGNASGNWHCDSTWLGDRVITTSTRTWALPTYNNHLYKQISSASTGASNDNHYFGYSTPWGYFDFNRFHCHFSPRDWQRLINNNWGFRPKRLNFKLFNIQVKEVTDNNGVKTIANNLTSTIQVFTDSEYQLPYVLGSAHQGCLPPFPADVFMIPQYGYLTLNNGSQAVGRSSFYCLEYFPSQMLRTGNNFQFTYTFEDVPFHSSYAHSQSLDRLMNPLIDQYLYYLSRTQTTGGTANTQTLGFSQGGPNTMANQAKNWLPGPCYRQQRVSTTTGQNNNSNFAWTAGTKYHLNGRNSLANPGIAMATHKDDKERFFPSNGILIFGKQNAARDNADYSDVMLTSEEEIKTTNPVATEEYGIVADNLQQQNTAPQIGTVNSQGALPGMVWQNRDVYLQGPIWAKIPHTDGNFHPSPLMGGFGLKHPPPQILIKNTPVPADPPTTFNQSKLNSFITQYSTGQVSVEIEWELQKENSKRWNPEIQYTSNYYKSTSVDFAVNTEGVYSEPHPIGTRYLTRPL

SEQ ID NO: 1082 - protein, 736 aa, synthetic construct
  REGION 1..736: note = source = /note="Description of Artificial Sequence: Synthetic polypeptide"
MAADGYLPDWLEDNLSEGIREWWDLKPGAPKPKANQQKQDDGRGLVLPGYKYLGPFNGLDKGEPVNAADAAALEHDKAYDQQLKAGDNPYLRYNHADAEFQERLQEDTSFGGNLGRAVFQAKKRVLEPLGLVEEGAKTAPGKKRPVEQSPQEPDSSSGIGKKGQQPARKRLNFGQTGDSESVPDPQPLGEPPAAPSGVGSLTMASGGGAPMADNNEGADGVGNASGNWHCDSTWLGDRVITTSTRTWALPTYNNHLYKQISSASTGASNDNHYFGYSTPWGYFDFNRFHCHFSPRDWQRLINNNWGFRPKRLNFKLFNIQVKEVTQNEGTKTIANNLTSTVQVFTDSDYQLPYVLGSAHQGCLPPFPADVFMIPQYGYLTLNNGSQAVGRSSFYCLEYFPSQMLRTGNNFQFTYTFEDVPFHSSYAHSQSLDRLMNPLIDQYLYYLSRTQTTGGTANTQTLGFSQGGPNTMANQAKNWLPGPCYRQQRVSTTTGQNNNSNFAWTAGTKYHLNGRNSLSNPGIAMATHKDDKERFFPSNGILIFGKQNAARDNADYSDVMLTSEEEIKTTNPVATEEYGIVADNLQQQNTAPQIGTVNSQGALPGMVWQNRDMYLQGPIWAKIPHTDGNFHPSPLMGGFGLKHPPPQILIKNTPVPADPPTTFNQSKLNSFITQYSTGQVSVEIEWELQKENSKRWNPEIQYTSNYYKSTSVDFAVNTEGVYSEPHPIGTRYLTRPL

SEQ ID NO: 1083 - protein, 736 aa, synthetic construct
  REGION 1..736: note = source = /note="Description of Artificial Sequence: Synthetic polypeptide"
MAADGYLPDWLEDNLSEGIREWWALKPGAPKPKANQQKQDDGRGLVLPGYKYLGPFNGLDKGEPVNAADAAALEHDKAYDQQLKAGDNPYLRYNHADAEFQERLQEDTSFGGNLGRAVFQAKKRVLEPFGLVEEGAKTAPGKKRPVEQSPQEPDSSSGIGKTGQQPAKKRLNFGQTGGSESVPDPQPLGEPPATPAAVGPTTMAAGGGAPMADNNEGADGVGSSSGNWHCDSTWLGDRVITTSTRTWALPTYNNHLYKQISSASTGASNDNHYFGYSTPWGYFDFNRFHCHFSPRDWQRLINNNWGFRPKRLNFKLFNIQVKEVTDNNGVKTIANNLTSTVQVFTDSEYQLPYVLGSAHQGCLPPFPADVFMIPQYGYLTLNNGSQAVGRSSFYCLEYFPSQMLRTGNNFTFSYTFEEVPFHSSYAHSQSLDRLMNPLIDQYLYYLSRTQTTGGTANTQTLGFSQGGPNTMANQAKNWLPGPCYRQQRVSTTTGQNNNSNFAWTAGTKYHLNGRNSLANPGIAMASHKDDKERFFPSNGILIFGKQNAARDNADYSDVMLTSEEEIKTTNPVATEEYGIVADNLQQQNTAPQIGTVNSQGALPGMVWQNRDVYLQGPIWAKIPHTDGNFHPSPLMGGFGLKHPPPQILIKNTPVPADPPTTFNQSKLNSFITQYSTGQVSVEIEWELQKENSKRWNPEIQYTSNYYKSTSVDFAVNTEGVYSEPHPIGTRYLTRPL

SEQ ID NO: 1084 - DNA, 2211 bp, synthetic construct
  misc_feature 1..2211: note = source = /note="Description of Artificial Sequence: Synthetic polynucleotide"
  source 1..2211: mol_type = other DNA
atggctgccgatggttatcttccagattggctcgaggacaacctctctgagggcattcgcgagtggtgggacttgaaacctgcatccccgaaacccaaagccaaccagcaaaagcaggacgacggccggggtctggtgcttcctggctacaagtacctcggacccttcaacggactcgacaagggggagcccgtcaacgcggcggacgcagcggccctcgagcacgacaaggcctacgaccagcagctcaaagcgggtgacaatccgtacctgcggtataaccacgccgacgccgagtttcaggagcgtctgcaagaagatacgtcttttgggggcaacctcgggcgagcagtcttccaggccaaaaagaggcttcttgaacctcttggtctggttgaggaagcggctaagacggctcctggaaagaagaggcctgtagagcagtctcctcaggaaccggactcctccgcgggtattggcaaatcgggtgcacagcccgccaaaaagagactcaatttcggtcagactggcggcacagagtcagttccagaccctcaacctctcggagaacctccagcagcgccctctggtgtgggacctaatacaatggctgcaggcggtggcgcaccaatggcagacaataacgaaggcgccgacggagtgggtagttcctcgggaaattggcattgcgattccacatggctgggcgacagagtcatcaccaccagcaccagaacctgggccctgcccacttacaacaaccatctctacaagcaaatctccagtgcttcaacgggggccagcaacgacaaccactacttcggctacagcaccccctgggggtattttgatttcaacagattccactgccacttctcaccacgtgactggcagcgactcatcaacaacaactggggattccggcccaagagactcagcttcaagctcttcaacatccaggtcaaggaggtcacgcagaatgaaggcaccaagaccatcgccaataacctcaccagcaccatccaggtgtttacggactcggagtaccagctgccgtacgttctcggctctgcccaccagggctgcctgcctccgttcccggcggacgtgttcatgattccccagtacggatacctaacactcaacaacggtagtcaggccgtgggacgctcctccttctactgcctggaatactttccttcgcagatgctgagaaccggcaacaacttccagtttacttacaccttcgaggacgtgcctttccacagcagctacgcccacagccagagcttggaccggctgatgaatcctctgattgaccagtacctgtactacttgtctcggactcaaacaacaggaggcacggcaaatacgcagactctgggcttcagccaaggtgggcctaatacaatggccaatcaggcaaagaactggctgccaggaccctgttaccgccaacaacgcgtctcaacgacaaccgggcaaaacaacaatagcaactttgcctggactgctgggaccaaataccatctgaatggaagaaattcattggctaatcctggcatcgctatggcaacacacaaagacgacaaggagcgtttttttcccagtaacgggatcctgatttttggcaaacaaaatgctgccagagacaatgcggattacagcgatgtcatgctcaccagcgaggaagaaatcaaaaccactaaccctgtggctacagaggaatacggtatcgtggcagataacttgcagcagcaaaacacggctcctcaaattggaactgtcaacagccagggggccttacccggtatggtctggcagaaccgggacgtgtacctgcagggtcccatctgggccaagattcctcacacggacggcaacttccacccgtctccgctgatgggcggctttggcctgaaacatcctccgcctcagatcctgatcaagaacacgcctgtacctgcggatcctccgaccaccttcaaccagtcaaagctgaactctttcatcacgcaatacagcaccggacaggtcagcgtggaaattgaatgggagctgcagaaggaaaacagcaagcgctggaaccccgagatccagtacacctccaactactacaaatctacaagtgtggactttgctgttaatacagaaggcgtgtactctgaaccccaccccattggcacccgttacctcacccgtcccctgtaa

SEQ ID NO: 1085 - DNA, 2211 bp, synthetic construct
  misc_feature 1..2211: note = source = /note="Description of Artificial Sequence: Synthetic polynucleotide"
  source 1..2211: mol_type = other DNA
atggctgccgatggttatcttccagattggctcgaggacaacctctctgagggcattcgcgagtggtgggacttgaaacctggagccccgaaacccaaagccaaccagcaaaagcaggacgacggccggggtctggtgcttcctggctacaagtacctcggacccttcaacggactcgacaagggggagcccgtcaacgcggcggacgcagcggccctcgagcacgacaaggcctacgaccagcagctcaaagcgggtgacaatccgtacctgcggtataaccacgccgacgccgagtttcaggagcgtctgcaagaagatacgtcttttgggggcaacctcgggcgagcagtcttccaggccaagaagagggttctcgaaccttttggtctggttgaggaaggcgctaagacggctcctggaaagaaacgtccggtagagcagtcgccacaagagccagactcctcctcgggcattggcaagacaggccagcagcccgctaaaaagagactcaattttggtcagactggcgactcagagtcagtccccgacccacaacctctcggagaacctccagcaacccccgctgctgtgggacctactacaatggcttcaggtggtggcgcaccaatggcagacaataacgaaggcgccgacggagtgggtaatgcctcaggaaattggcattgcgattcccaatggctgggggacagagtcatcaccaccagcacccgaacctgggccctgcccacctacaacaatcacctctacaagcaaatctccagtgcttcaacgggggccagcaacgacaaccactacttcggctacagcaccccctgggggtattttgatttcaacagattccactgccatttctcaccacgtgactggcagcgactcatcaacaacaattggggattccggcccaagagactcaacttcaaactcttcaacatccaagtcaaggaggtcacgcagaatgaaggcaccaagaccatcgccaataacctcaccagcaccatccaggtgtttacggactcggagtaccagctgccgtacgttctcggctccgcccaccagggctgcctgcctccgttcccggcggacgtgttcatgattccccagtacggctacctaacactcaacaacggtagtcaggccgtgggacgctcctccttctactgcctggaatactttccttcgcagatgctgagaaccggcaacaacttccagtttacttacaccttcgaggacgtgcctttccacagcagctacgcccacagccagagcttggaccggctgatgaatcctctgattgaccagtacctgtactacttgtctcggactcaaacaacaggaggcacggcaaatacgcagactctgggcttcagccaaggtgggcctaatacaatggccaatcaggcaaagaactggctgccaggaccctgttaccgccaacaacgcgtctcaacgacaaccgggcaaaacaacaatagcaactttgcctggactgctgggaccaaataccatctgaatggaagaaattcattggctaatcctggcatcgctatggcaacacacaaagacgacaaggagcgtttttttcccagtaacgggatcctgatttttggcaaacaaaatgctgccagagacaatgcggattacagcgatgtcatgctcaccagcgaggaagaaatcaaaaccactaaccctgtggctacagaggaatacggtatcgtggcagataacttgcagcagcaaaacacggctcctcaaattggaactgtcaacagccagggggccttacccggtatggtctggcagaaccgggacgtgtacctgcagggtcccatctgggccaagattcctcacacggacggcaacttccacccgtctccgctgatgggcggctttggcctgaaacatcctccgcctcagatcctgatcaagaacacgcctgtacctgcggatcctccgaccaccttcaaccagtcaaagctgaactctttcatcacgcaatacagcaccggacaggtcagcgtggaaattgaatgggagctgcagaaggaaaacagcaagcgctggaaccccgagatccagtacacctccaactactacaaatctacaagtgtggactttgctgttaatacagaaggcgtgtactctgaaccccaccccattggcacccgttacctcacccgtcccctgtaa

SEQ ID NO: 1086 - DNA, 2211 bp, synthetic construct
  misc_feature 1..2211: note = source = /note="Description of Artificial Sequence: Synthetic polynucleotide"
  source 1..2211: mol_type = other DNA
atggctgccgatggttatcttccagattggctcgaggacaacctctctgagggcattcgcgagtggtgggacttggaacctggagccccgaagcccaaagccaaccagcaaaagcaggacgacggccggggtctggtgcttcctggctacaagtacctcggacccttcaacggactcgacaagggggagcccgtcaacgcggcggacgcagcggccctcgagcacgacaaggcctacgaccagcagctcaaagcgggtgacaatccgtacctgcggtataaccacgccgacgccgagtttcaggagcgtctgcaagaagatacgtcttttgggggcaacctcgggcgagcagtcttccaggccaagaagcgggttctcgaacctctcggtctggttgaggaaggcgctaagacggctcctggaaagaaacgtccggtagagcagtcgccacaagagccagactcctcctcgggcatcggcaagacaggccagcagcccgctaaaaagagactcaattttggtcagactggcgactcagagtcagtccccgatccacaacctctcggagaacctccagcaacccccgctgctgtgggacctactacaatggcttcaggcggtggcgcaccaatggcagacaataacgaaggcgccgacggagtgggtaatgcctcaggaaattggcattgcgattccacatggctgggcgacagagtcatcaccaccagcacccgcacctgggccttgcccacctacaataaccacctctacaagcaaatctccagtgcttcaacaggggccagcaacgacaaccactacttcggctacagcaccccctgggggtattttgacttcaacagattccactgccacttctcaccacgtgactggcagcgactcatcaacaacaactggggattccggcctaagcgactcaacttcaagctcttcaacattcaggtcaaagaggttacggacaacaatggagtcaagaccatcgccaataaccttaccagcacggtccaggtcttcacggactcggagtaccagttgccgtacgtcctcggctctgcgcaccagggctgcctccctccgttcccggcggacgtgttcatgattccgcagtacggctacctaacgctcaacaacggtagtcaggccgtgggacgctcctccttctactgcctggaatactttccttcgcagatgctgagaaccggcaacaacttccagtttacttacaccttcgaggacgtgcctttccacagcagctacgcccacagccagagcttggaccggctgatgaatcctctgattgaccagtacctgtactacttgtctcggactcaaacaacaggaggcacggcaaatacgcagactctgggcttcagccaaggtgggcctaatacaatggccaatcaggcaaagaactggctgccaggaccctgttaccgccaacaacgcgtctcaacgacaaccgggcaaaacaacaatagcaactttgcctggactgctgggaccaaataccatctgaatggaagaaattcattggctaatcctggcatcgctatggcaacacacaaagacgacaaggagcgtttttttcccagtaacgggatcctgatttttggcaaacaaaatgctgccagagacaatgcggattacagcgatgtcatgctcaccagcgaggaagaaatcaaaaccactaaccctgtggctacagaggaatacggtatcgtggcagataacttgcagcagcaaaacacggctcctcaaattggaactgtcaacagccagggggccttacccggtatggtctggcagaaccgggacgtgtacctgcagggtcccatctgggccaagattcctcacacggacggcaacttccacccgtctccgctgatgggcggctttggcctgaaacatcctccgcctcagatcctgatcaagaacacgcctgtacctgcggatcctccgaccaccttcaaccagtcaaagctgaactctttcatcacgcaatacagcaccggacaggtcagcgtggaaattgaatgggagctgcagaaggaaaacagcaagcgctggaaccccgagatccagtacacctccaactactacaaatctacaagtgtggactttgctgttaatacagaaggcgtgtactctgaaccccaccccattggcacccgttacctcacccgtcccctgtaa

SEQ ID NO: 1087 - DNA, 2211 bp, synthetic construct
  misc_feature 1..2211: note = source = /note="Description of Artificial Sequence: Synthetic polynucleotide"
  source 1..2211: mol_type = other DNA
atggctgccgatggttatcttccagattggctcgaggacactctctctgaaggaataagacagtggtggaagctcaaacctggcccaccaccaccaaagcccgcagagcggcataaggacgacagcaggggtcttgtgcttcctgggtacaagtacctcggacccttcaacggactcgacaagggagagccggtcaacgaggcagacgccgcggccctcgagcacgacaaagcctacgaccggcagctcgacagcggagacaacccgtacctcaagtacaaccacgccgacgcggagtttcaggagcgccttaaagaagatacgtcttttgggggcaacctcgggcgagcagtcttccaggccaagaagagggttctcgaaccttttggtctggttgaggaaggtgctaagacggctcctggaaagaaacgtccggtagagcagtcgccacaagagccagactcctcctcgggcattggcaagacaggccagcagcccgctaaaaagagactcaattttggtcagactggcgactcagagtcagtccccgacccacaacctctcggagaacctccagcaacccccgctgctgtgggacctactacaatggcttcaggcggtggcgcaccaatggcagacaataacgaaggcgccgacggagtgggtaatgcctcaggaaattggcattgcgattccacatggctgggcgacagagtcatcaccaccagcacccgaacatgggccttgcccacctataacaaccacctctacaagcaaatctccagtgcttcaacgggggccagcaacgacaaccactacttcggctacagcaccccctgggggtattttgacttcaacagattccactgccacttctcaccacgtgactggcagcgactcatcaacaacaactggggattccggcctaagcgactcaacttcaagctcttcaacattcaggtcaaagaggttacggacaacaatggagtcaagaccatcgccaataaccttaccagcacggtccaggtcttcacggactcagactatcagctcccgtacgtgctcgggtcggctcacgagggctgcctcccgccgttcccagcggacgttttcatgattcctcagtacggctacctaacactcaacaacggtagtcaggccgtgggacgctcctccttctactgcctggaatactttccttcgcagatgctgagaaccggcaacaacttccagtttacttacaccttcgaggacgtgcctttccacagcagctacgcgcacagccagagtctggaccggctgatgaatcctctgattgaccagtacctgtactacttgtctcggactcaaacaacaggaggcacggcaaatacgcagactctgggcttcagccaaggtgggcctaatacaatggccaatcaggcaaagaactggctgccaggaccctgttaccgccaacaacgcgtctcaacgacaaccgggcaaaacaacaatagcaactttgcctggactgctgggaccaaataccatctgaatggaagaaattcattggctaatcctggcatcgctatggcaacacacaaagacgacaaggagcgtttttttcccagtaacgggatcctgattttcggcaaacaaaatgctgccagagacaatgcggattacagcgatgtcatgctcaccagcgaggaagaaatcaaaaccactaaccctgtggctacagaggaatacggtatcgtggcagataacttgcagcagcaaaacacggctcctcaaattggaactgtcaacagccagggggccttacccggtatggtctggcagaaccgggacgtgtacctgcagggtcccatctgggccaagattcctcacacggacggcaacttccacccgtctccgctgatgggcggctttggcctgaaacatcctccgcctcagatcctgatcaagaacacgcctgtacctgcggatcctccgaccaccttcaaccagtcaaagctgaactctttcatcacgcaatacagcaccggacaggtcagcgtggaaattgaatgggagctgcagaaggaaaacagcaagcgctggaaccccgagatccagtacacctccaactactacaaatctacaagtgtggactttgctgttaatacagaaggcgtgtactctgaaccccaccccattggcaccagatacctgactcgtaatctgtaa

SEQ ID NO: 1088 - DNA, 2208 bp, synthetic construct
  misc_feature 1..2208: note = source = /note="Description of Artificial Sequence: Synthetic polynucleotide"
  source 1..2208: mol_type = other DNA
atggctgccgatggttatcttccagattggctcgaggacactctctctgaaggaataagacagtggtggaagctcaaacctggcccaccaccaccaaagcccgcagagcggcataaggacgacagcaggggtcttgtgcttcctgggtacaagtacctcggacccttcaacggactcgacaagggagagccggtcaacgaggcagacgccgcggccctcgagcacgacaaagcctacgaccggcagctcgacagcggagacaacccgtacctcaagtacaaccacgccgacgcggagtttcaggagcgccttaaagaagatacgtcttttgggggcaacctcggacgagcagtcttccaggcgaaaaagagggttcttgaacctctgggcctggttgaggaacctgttaagacggctccgggaaaaaagaggccggtagagcagtcgccacaagagccagactcctcctcgggcatcggcaagaaaggccagcagcccgctaaaaagagactcaattttggtcagactggcgactcagagtcagtccccgacccacaacctctcggagaacctccagcaacccccgctgctgtgggacctactacaatggcttcaggcggtggcgcaccaatggcggacaataacgaaggcgccgatggagtgggtaatgcctcaggaaattggcattgcgattccacatggctgggcgacagagtcatcaccaccagcacccgaacatgggccttgcccacctataacaaccacctctacaagcaaatctccagtgcttcaacgggggccagcaacgacaaccactacttcggctacagcaccccctgggggtattttgacttcaacagattccactgccacttctcaccacgtgactggcagcgactcatcaacaacaactggggattccggcctaagcgactcaacttcaagctcttcaacattcaggtcaaagaggttacggacaacaatggagtcaagaccatcgccaataaccttaccagcacggtccaggtcttcacggactcagactatcagctcccgtacgttctcggctctgcccaccagggctgcctgcctccgttcccggcggacgtgttcatgattccccagtacggctacctaacactcaacaacggtagtcaggccgtgggacgctcctccttctactgcctggaatactttccttcgcagatgctgagaaccggcaacaacttccagtttacttacaccttcgaggacgtgcctttccacagcagctacgcccacagccagagcttggaccggctgatgaatcctctgattgaccagtacctgtactacttgtctcggactcaaacaacaggaggcacggcaaatacgcagactctgggcttcagccaaggtgggcctaatacaatggccaatcaggcaaagaactggctgccaggaccctgttaccgccaacaacgcgtctcaacgacaaccgggcaaaacaacaatagcaactttgcctggactgctgggaccaaataccatctgaatggaagaaattcattggctaatcctggcatcgctatggcaacacacaaagacgacaaggagcgtttttttcccagtaacgggatcctgatttttggcaaacaaaatgctgccagagacaatgcggattacagcgatgtcatgctcaccagcgaggaagaaatcaaaaccactaaccctgtggctacagaggaatacggtatcgtggcagataacttgcagcagcaaaacacggctcctcaaattggaactgtcaacagccagggggccttacccggtatggtctggcagaaccgggacgtgtacctgcagggtcccatctgggccaagattcctcacacggacggcaacttccacccgtctccgctgatgggcggctttggcctgaaacatcctccgcctcagatcctgatcaagaacacgcctgtacctgcggatcctccgaccaccttcaaccagtcaaagctgaactctttcatcacgcaatacagcaccggacaggtcagcgtggaaattgaatgggagctgcagaaggaaaacagcaagcgctggaaccccgagatccagtacacctccaactactacaaatctacaagtgtggactttgctgttaatacagaaggcgtgtactctgaaccccaccccattggcacccgttacctcacccgtcccctg

SEQ ID NO: 1089 - DNA, 2211 bp, synthetic construct
  misc_feature 1..2211: note = source = /note="Description of Artificial Sequence: Synthetic polynucleotide"
  source 1..2211: mol_type = other DNA
atggctgccgatggttatcttccagattggctcgaggacactctctctgaaggaataagacagtggtggaagctcaaacctggcccaccaccaccaaagcccgcagagcggcataaggacgacagcaggggtcttgtgcttcctgggtacaagtacctcggacccttcaacggactcgacaagggagagccggtcaacgaggcagacgccgcggccctcgagcacgacaaagcctacgaccagcagctccaagcgggtgacaatccgtacctgcggtataaccacgccgacgccgagtttcaggagcgtcttcaaggagatacgtcttttgggggcaacctcggacgagcagtcttccaggccaaaaagaggcttcttgaacctcttggtctggttgaggaagcggctaagacggctcctggaaagaagaggcctgtagagcagtctcctcaggaaccggactcctccgcgggtattggcaaatcgggtgcacagcccgctaaaaagagactcaatttcggtcagactggcgacacagagtcagtcccagaccctcaaccaatcggagaacctcccgcagccccctcaggtgtgggatctcttacaatggcttcaggtggtggcgcaccagtggcagacaataacgaaggtgccgatggagtgggtagttcctcgggaaattggcattgcgattcccaatggctgggggacagagtcatcaccaccagcacccgaacatgggccttgcccacctataacaaccacctctacaagcaaatctccagtgcttcaacgggggccagcaacgacaaccactacttcggctacagcaccccctgggggtattttgacttcaaccgcttccactgccacttctcaccacgtgactggcagcgactcatcaacaacaactggggattccggcccaagagactcagcttcaagctcttcaaccatccaggtcaaggaggtcacgcagaatgaaggcaccaagaccatcgccaataacctcaccagcacatccaggtgtttacggactcggagtaccagctgccgtacgttctcggctctgcccaccagggctgcctgcctccgttcccggcggacgtgttcatgattccccagtacggctacctaacactcaacaacggtagtcaggccgtgggacgctcctccttctactgcctggaatactttccttcgcagatgctgagaaccggcaacaacttccagttcacttacaccttcgaggacgtgcctttccacagcagctacgcgcacagccagagcttggaccggctgatgaatcctctgattgaccagtacctgtactacttgtctcggactcaaacaacaggaggcacggcaaatacgcagactctgggcttcagccaaggtgggcctaatacaatggccaatcaggcaaagaactggctgccaggaccctgttaccgccaacaacgcgtctcaacgacaaccgggcaaaacaacaatagcaactttgcctggactgctgggaccaaataccatctgaatggaagaaattcattgggtaatcctggcatcgctatggcaacacacaaagacgacaaggagcgtttttttcccagtaacgggatcctgatttttggcaaacaaaatgctgccagagacaatgcggattacagcgatgtcatgctcaccagcgaggaagaaatcaaaaccactaaccctgtggctacagaggaatacggtatcgtggcagataacttgcagcagcaaaacacggctcctcaaattggaactgtcaacagccagggggccttacccggtatggtctggcagaaccgggacgtgtacctgcagggtcccatctgggccaagattcctcacacggacggcaacttccacccgtctccgctgatgggcggctttggcctgaaacatcctccgcctcagatcctcatcaaaaacacacctgtacctgcggatcctccaacggccttcaaccagtcaaagctgaactctttcatcacgcaatacagcaccggacaggtcagcgtggaaattgaatgggagctgcagaaggaaaacagcaagcgctggaaccccgagatccagtacacctccaactactacaaatctacaagtgtggactttgctgttaatacagaaggcgtgtactctgaaccccaccccattggcacccgttacctcacccgtcccctgtaa

SEQ ID NO: 1090 - DNA, 2214 bp, synthetic construct
  misc_feature 1..2214: note = source = /note="Description of Artificial Sequence: Synthetic polynucleotide"
  source 1..2214: mol_type = other DNA
atggctgccgatggttatcttccagattggctcgaggacaacctctctgagggcattcgcgagtggtgggacttgaaacatggagccccgaaacccaaagccaaccagcaaaagcaggacgacggccggggtctggtgcttcctggctacaagtacctcggacccttcaacggactcgacaagggggagcccgtcaacgcggcggatgcagcggccctcgagcacgacaaggcctacgaccagcagctcaaagcgggtgacaatccgtacctgcggtataaccacgccgacgccgagtttcaggagcgtctgcaagaagatacgtcttttgggggcaacctcgggcgagcagtcttccaggccaagaagagggttctcgaaccttttggtctggttgaggaaggtgctaagacggctcctggaaagaaacgtccggtagagcagtcgccacaagagccagactcctcctcgggcattggcaagacaggccagcagcccgctaaaaagagactcaattttggtcagactggcgactcagagtcagtccccgacccacaacctctcggagaacctccagcaacccccgctgctgtgggacctactacaatggcttcaggcggtggcgcaccaatggcagacaataacgaaggcgccgacggagtgggtaatgcctcaggaaattggcattgcgattccacatggctgggcgacagagtcatcaccaccagcacccgaacatgggccttgcccacctataacaaccacctctacaagcaaatctccaacgggacttcgggaggaagcaccaacgacaacacctacttcggctacagcaccccctgggggtattttgactttaacagattccactgccacttctcaccacgtgactggcagcgactcatcaacaacaactggggattccggcccaagagactcaacttcaaactcttcaacatccaagtcaaggaggtcacgcagaatgaaggcaccaagaccatcgccaataacctcaccagcaccatccaggtgtttacggactcggagtaccagctgccgtacgttctcggctccgcccaccagggctgcctgcctccgttcccggcggacgtgttcatgattccccagtacggctacctaacactcaacaacggtagtcaggccgtgggacgctcctccttctactgcctggaatactttccttcgcagatgctgagaacgggcaacaactttaccttcagctacacctttgaggacgttcctttccacagcagctacgctcacagccagagtctggaccgtctcatgaatcctctgattgaccagtacctgtactacttgtctcggactcaaacaacaggaggcacggcaaatacgcagactctgggcttcagccaaggtgggcctaatacaatggccaatcaggcaaagaactggctgccaggaccctgttaccgccaacaacgcgtctcaacgacaaccgggcaaaacaacaatagcaactttgcctggactgctgggaccaaataccatctgaatggaagaaattcattggctaatcctggcatcgctatggcaacacacaaagacgacaaggagcgtttttttcccagtaacgggatcctgatttttggcaaacaaaatgctgccagagacaatgcggattacagcgatgtcatgctcaccagcgaggaagaaatcaaaaccactaaccctgtggctacagaggaatacggtatcgtggcagataacttgcagcagcaaaacacggctcctcaaattggaactgtcaacagccagggggccttacccggtatggtctggcagaaccgggacgtgtacctgcagggtcccatctgggccaagattcctcacacggacggcaacttccacccgtctccgctgatgggcggctttggcctgaaacatcctccgcctcagatcctgatcaagaacacgcctgtacctgcggatcctccgaccaccttcaaccagtcaaagctgaactctttcatcacgcaatacagcaccggacaggtcagcgtggaaattgaatgggagctgcagaaggaaaacagcaagcgctggaaccccgagatccagtacacctccaactactacaaatctacaagtgtggactttgctgttaatacagaaggcgtgtactctgatccccaccccattggcacccgttacctcacccgtcccctgtaa

SEQ ID NO: 1091 - DNA, 2214 bp, synthetic construct
  misc_feature 1..2214: note = source = /note="Description of Artificial Sequence: Synthetic polynucleotide"
  source 1..2214: mol_type = other DNA
atggctgccgatggttatcttccagattggctcgaggacaacctctctgagggcattcgcgagtggtgggcgctgaaacctggagccccgaagcccaaagccaaccagcaaaagcaggacgacggccggggtctggtgcttcctggctacaagtacctcggacccttcaacggactcgacaaaggagagccggtcaacgaggcggacgcggcagccctcgaacacgacaaggcctacgaccagcagctcaaagcgggtgacaatccgtacctgcggtataaccacgccgacgccgagtttcaggagcgtctgcaagaagatacgtcttttgggggcaacctcgggcgagcagtcttccaggccaagaagcgggttctcgaacctctcggtctggttgaggaaggcgctaagacggctcctggaaagaagagaccggtagagccatcaccccagcgttctccagactcctctacgggcatcggcaagaaaggccagcagcccgccagaaaaagactcaattttggtcagactggcgactcagagtcagttccagaccctcaacctctcggagaacctccagcagcgccctctggtgtgggacctaatacaatggcttcaggcggtggcgcaccaatggcagacaataacgagggcgccgacggagtgggtaattcctcgggaaattggcattgcgattccacatggatgggcgacagagtcatcaccaccagcacccgaacctgggccctgcccacctacaacaaccacctctacaagcaaatctccagtgcttcaacgggggccagcaacgacaaccactacttcggctacagcaccccctgggggtattttgactttaacagattccactgccacttttcaccacgtgactggcagcgactcatcaacaacaactggggattccggcccaagagactcaacttcaagctcttcaacatccaagtcaaggaggtcacgcagaatgaaggcaccaagaccatcgccaataacctcaccagcaccatccaggtgtttacggactcggagtaccagctgccgtacgttctcggctctgcccaccagggctgcctgcctccgttcccggcggacgtgttcatgattccccagtacggctacctaacactcaacaacggtagtcaggccgtgggacgctcctccttctactgcctggaatactttccttcgcagatgctgagaaccggcaacaacttccagtttacttacaccttcgaggacgtgcctttccacagcagctacgcgcacagccagagcttggaccggctgatgaatcctctgattgaccagtacctgtactacttgtctcggactcaaacaacaggaggcacggcaaatacgcagactctgggcttcagccaaggtgggcctaatacaatggccaatcaggcaaagaactggctgccaggaccctgttaccgccaacaacgcgtctcaacgacaaccgggcaaaacaacaatagcaactttgcctggactgctgggaccaaataccatctgaatggaagaaattcattggctaatcctggcatcgctatggcaacacacaaagacgacaaggagcgtttttttcccagtaacgggatcctgatttttggcaaacaaaatgctgccagagacaatgcggattacagcgatgtcatgctcaccagcgaggaagaaatcaaaaccactaaccctgtggctacagaggaatacggtatcgtggcagataacttgcagcagcaaaacacggctcctcaaattggaactgtcaacagccagggggccttacccggtatggtctggcagaaccgggacgtgtacctgcagggtcccatctgggccaagattcctcacacggacggcaacttccacccgtctccgctgatgggcggctttggcctgaaacatcctccgcctcagatcctgatcaagaacacgcctgtacctgcggatcctccgaccaccttcaaccagtcaaagctgaactctttcatcacacaatacagcaccggacaggtcagcgtggaaattgaatgggagctgcagaaggaaaacagcaagcgctggaaccccgagatccagtacacctccaactactacaaatctacaagtgtggactttgctgttaatacagaaggcgtgtactctgaaccccaccccattggcacccgttacctcacccgtcccctgtaa

SEQ ID NO: 1092 - DNA, 2211 bp, synthetic construct
  misc_difference 676: note = modified_base - a, c, t, or g
  misc_feature 1..2211: note = source = /note="Description of Artificial Sequence: Synthetic polynucleotide"
  source 1..2211: mol_type = other DNA
atggctgccgatggttatcttccagattggctcgaggacactctctctgaaggaataagacagtggtggaagctcaaacctggcccaccaccaccaaagcccgcagagcggcataaggacgacagcaggggtcttgtgcttcctgggtacaagtacctcggacccttcaacggactcgacaagggagagccggtcaacgaggcagacgccgcggccctcgagcacgacaaagcctacgaccggcagctcgacagcggagacaacccgtacctcaagtacaaccacgccgacgcggagtttcaggagcgccttaaagaagatacgtcttttgggggcaacctcggacgagcagtcttccaggcgaaaaagagggttcttgaacctctgggcctggttgaggaacctgttaagacggctccgggaaaaaagaggccggtagagcagtcgccacaagagccagactcctcctcgggcatcggcaagaaaggccagcagcccgctaaaaagagactcaattttggtcagactggcgactcagagtcagtccccgacccacaacctctcggagaacctccagcaacccccgctgctgtgggacctactacaatggcttcaggcggtggcgcaccaatggcggacaataacgaaggcgccgatggagtgggtaatgcctcangaaattggcattgcgattccacatggctgggcgacagagtcatcaccaccagcacccgaacatgggccttgccacctataacaaccacctctacaagcaaatctccagtgcttcaacgggggcgcagcaacgacaaccactacttcggctacagcaccccctgggggtattttgacttcaacagattccactgccacttctcaccacgtgactggcagcgactcatcaacaacaactggggattccggcctaagcgactcaacttcaagctcttcaacattcaggtcaaagaggttacggacaacaatggagtcaagaccatcgccaataaccttaccagcacggtccaggtcttcacggactcagactatcagctcccgtacgttctcggctctgcccaccagggctgcctgcctccgttcccggcggacgtgttcatgattccccagtacggctacctaacactcaacaacggtagtcaggccgtgggacgctcctccttctactgcctggaatactttccttcgcagatgctgagaaccggcaacaacttccagtttacttacaccttcgaggacgtgcctttccacagcagctacgcccacagccagagcttggaccggctgatgaatcctctgattgaccagtacctgtactacttgtctcggactcaaacaacaggaggcacggcaaatacgcagactctgggcttcagccaaggtgggcctaatacaatggccaatcaggcaaagaactggctgccaggaccctgttaccgccaacaacgcgtctcaacgacaaccgggcaaaacaacaatagcaactttgcctggactgctgggaccaaataccatctgaatggaagaaattcattggctaatcctggcatcgctatggcaacacacaaagacgacaaggagcgtttttttcccagtaacgggatcctgatttttggcaaacaaaatgctgccagagacaatgcggattacagcgatgtcatgctcaccagcgaggaagaaatcaaaaccactaaccctgtggctacagaggaatacggtatcgtggcagataacttgcagcagcaaaacacggctcctcaaattggaactgtcaacagccagggggccttacccggtatggtttggcagaaccgggacgtgtacctgcagggtcccatctgggccaagattcctcacacggacggcaacttccacccgtctccgctgatgggcggctttggcctgaaacatcctccgcctcagatcctgatcaagaacacgcctgtacctgcggatcctccgaccaccttcaaccagtcaaagctgaactctttcatcacacagtactccacgggacaggtcagcgtggaaattgaatgggagctgcagaaggaaaacagcaagcgctggaacccggagatccagtacacttccaactactacaaatctacaaatgtggactttgctgttaacacagaaggcgtgtactctgaaccccaccccattggcacccgttacctcacccgtcccctgtaa

SEQ ID NO: 1093 - DNA, 2211 bp, synthetic construct
  misc_difference 715: note = modified_base - a, c, t, or g
  misc_feature 1..2211: note = source = /note="Description of Artificial Sequence: Synthetic polynucleotide"
  source 1..2211: mol_type = other DNA
atggctgccgatggttatcttccagattggctcgaggacaacctctctgagggcattcgcgagtggtgggacttgaaacctggagccccgaaacccaaagccaaccagcaaaagcaggacgacggccggggtctggtgcttcctggctacaagtacctcggacccttcaacggactcgacaagggggagcccgtcaacgcggcggatgcagcggccctcgagcacgacaaggcctacgaccagcagctccaagcgggtgacaatccgtacctgcggtataaccacgccgacgccgagtttcaggagcgtcttcaaggagatacgtcttttgggggcaacctcggacgagcagtcttccaggccaagaagcgggttctcgaacctctcggtctggttgaggaagcggctaagacggctcctggaaagaagaggcctgtagagcagtctcctcaggaaccggactcctccgcgggtattggcaaatcgggtgcacagcccgctaaaaagagactcaatttcggtcagactggcgacacagagtcagtcccagaccctcaaccaatcggagaacctcccgcagccccctctggtgtgggacctaatacaatggctgcaggcggtggcgcaccaatggcagacaataacgaaggcgccgatggagtgggtagttcctcgggaaattggcattgcgattccacatggctgggcgacagantcatcaccaccagcacccgaacctgggccctgcccacctataacaaccatctctacaagcaaatctccagtgcttcaacgggggccagcaacgacaaccactacttcggctacagcaccccctgggggtattttgacttcaacagattccactgccacttctcaccacgtgactggcagcgactcatcaacaacaactggggattccggcctaagcgactcaacttcaagctcttcaacattcaggtcaaagaggttacggacaacaatggagtcaagaccatcgccaataaccttaccagcacggtccaggtcttcacggactcggagtaccagttgccgtacgtcctcggctctgcgcaccagggctgcctgcctccgttcccggcggacgtgttcatgattccgcagtacggctacctaacgctcaacaatggcagccaggcagtgggacggtcatccttttactgcctggaatatttcccatcgcagatgctgagaacgggcaacaactttaccttcagctacacttttgaggacgttcctttccacagcagctacgctcacagccagagtctggaccgtctcatgaatcctctgattgaccagtacctgtactacttgtctcggactcaaacaacaggaggcacggcaaatacgcagactctgggcttcagccaaggtgggcctaatacaatggccaatcaggcaaagaactggctgccaggaccctgttaccgccaacaacgcgtctcaacgacaaccggacaaaacaacaatagcaactttgcctggactgctgggaccaaataccatctgaatggaagaaattcattggctaatcctggcatcgctatggcaacacacaaagacgacaaggagcgtttttttcccagtaacgggatcctgatttttggcaaacaaaatgctgccagagacaatgcggattacagcgatgtcatgctcaccagcgaggaagaaatcaaaaccactaaccctgtggctacagaggaatacggtatcgtggcagataactttcagcagcaaaacacggctcctcaaattggaactgtcaacagccagggggccttacccggtatggtctggcagaaccgggacgtgtacctgcagggtcccatctgggccaagattcctcacacggacggcaacttccacccgtctccgctgatgggcggctttggcctgaaacatcctccgcctcagatcctgatcaagaacacgcctgtacctgcggatcctccgaccaccttcaaccagtcaaagctgaactctttcatcacgcaatacagcaccggacaggtcagcgtggaaattgaatgggagctgcagaaggaaaacagcaagcgctggaaccccgagatccagtacacctccaactactacaaatctacaagtgtggactttgctgttaatacagaaggcgtgtactctgaaccccaccccattggcacccgttacctcacccgtcccctgtaa

SEQ ID NO: 1094 - DNA, 2211 bp, synthetic construct
  misc_feature 1..2211: note = source = /note="Description of Artificial Sequence: Synthetic polynucleotide"
  source 1..2211: mol_type = other DNA
atggctgccgatggttatcttccagattggctcgaggacaacctctctgagggcattcgcgagtggtgggcgctgaaacctggagccccgaagcccaaagccaaccagcaaaagcaggacgacggccggggtctggtgcttcctggctacaagtacctcggacccttcaacggactcgacaaaggagagccggtcaacgaggcggacgcggcagccctcgaacacgacaaagcttacgaccagcagctcaaggccggtgacaacccctacctcaagtataaccacgccgacgccgagtttcaggagcgtctgcaagaagatacgtcttttgggggcaacctcgggcgagcagtcttccaggccaaaaagaggcttcttgaacctcttggtctggttgaggaagcggctaagacggctcctggaaagaagaggcctgtagagcagtctcctcaggaaccggactcctccgcgggtattggcaaatcgggtgcacagcccgctaaaaagagactcaatttcggtcagactggcgacacagagtcagtcccagacccacaacctctcggagaacctccagcaacccccgctgctgtgggacctactacaatggcttcaggcggtggcgcaccaatggcggacaataacgaaggcgccgatggagtgggtaatgcctcaggaaattggcattgcgattccacatggctgggcgacagagtcatcaccaccagcacccgaacatgggccttgcccacctataacaaccacctctacaagcaaatctccagtgcttcaacgggggccagcaacgacaaccactacttcggctacagcaccccctgggggtattttgacttcaacagattccactgccacttctcaccacgtgactggcagcgactcatcaacaacaactggggattccggcccaagagactcagcttcaagctcttcaacatccaggtcaaggaggtcacgcagaatgaaggcaccaagaccatcgccaataacctcaccagcaccatccaggtgtttacggactcggagtaccagctgccgtacgttctcggctccgcccaccagggctgcctgcctccgttcccggcggacgtgttcatgattccccagtacggctacctaacactcaacaacggtagtcaggccgtgggacgctcctccttctactgcctggaatactttccttcgcagatgctgagaaccggcaacaacttccagtttacttacaccttcgaggacgtgcctttccacagcagctacgcccacagccagagcttggaccggctgatgaatcctctgattgaccagtacctgtactacttgtctcggactcaaacaacaggaggcacggcaaatacgcagactctgggcttcagccaaggtgggcctaatacaatggccaatcaggcaaagaactggctgccaggaccctgttaccgccaacaacgcgtctcaacgacaaccgggcaaaacaacaatagcaactttgcctggactgctgggaccaaataccatctgaatggaagaaattcattggctaatcctggcatcgctatggcaacacacaaagacgacaaggagcgtttttttcccagtaacgggatcctgatttttggcaaacaaaatgctgccagagacaatgcggattacagcgatgtcatgctcaccagcgaggaagaaatcaaaaccactaaccctgtggctacagaggaatacggtatcgtggcagataacttgcagcagcaaaacacggctcctcaaattggaactgtcaacagccagggggccttacccggtatggtctggcagaaccgggacgtgtacctgcagggtcccatctgggccaagattcctcacacggacggcaacttccacccgtctccgctgatgggcggctttggcctgaaacatcctccgcctcagatcctgatcaagaacacgcctgtacctgcggatcctccgaccaccttcaaccagtcaaagctgaactctttcatcacgcaatacagcaccggacaggtcagcgtggaaattgaatgggagctgcagaaggaaaacagcaagcgctggaaccccgagatccagtacacctccaactactacaaatctacaagtgtggactttgctgttaatacagaaggcgtgtactctgaaccccaccccattggcacccgttacctcacccgtcccctgtaa

SEQ ID NO: 1095 - DNA, 2211 bp, synthetic construct
  misc_feature 1..2211: note = source = /note="Description of Artificial Sequence: Synthetic polynucleotide"
  source 1..2211: mol_type = other DNA
atggctgccgatggttatcttccagattggctcgaggacactctctctgaaggaataagacagtggtggaagctcaaacctggcccaccaccaccaaagcccgcagagcggcataaggacgacagcaggggtcttgtgcttcctgggtacaagtacctcggacccttcaacggactcgacaagggagagccggtcaacgaggcagacgccgcggccctcgagcacgacaaagcctacgaccagcagctccaagcgggtgacaatccgtacctgcggtataaccacgccgacgccgagtttcaggagcgtcttcaaggagatacgtcttttgggggcaacctcggacgagcagtcttccaggccaaaaagaggcttcttgaacctcttggtctggttgaggaagcggctaagacggctcctggaaagaagaggcctgtagagcagtctcctcaggaaccggactcctccgcgggtattggcaaatcgggtgcacagcccgctaaaaagagactcaatttcggtcagactggcgacacagagtcagtcccagaccctcaaccaatcggagaacctcccgcagccccctcaggtgtgggatctcttacaatggcttcaggtggtggcgcaccagtggcagacaataacgaaggtgccgatggagtgggtagttcctcgggaaattggcattgcgattcccaatggctgggggacagagtcatcaccaccagcacccgaacatgggccttgcccacctataacaaccacctctacaagcaaatctccagtgcttcaacgggggccagcaacgacaaccactacttcggctacagcaccccctgggggtattttgacttcaaccgcttccactgccacttctcaccacgtgactggcagcgactcatcaacaacaactggggattccggcccaagagactcagcttcaagctcttcaacatccaggtcaaggaggtcacgcagaatgaaggcaccaagaccatcgccaataacctcaccagcaccatccaggtgtttacggactcggagtaccagctgccgtacgttctcggctctgcccaccagggctgcctgcctccgttcccggcggacgtgttcatgattccccagtacggctacctaacactcaacaacggtagtcaggccgtgggacgctcctccttctactgcctggaatactttccttcgcagatgctgagaaccggcaacaacttccagtttacttacaccttcgaggacgtgcctttccacagcagctacgcccacagccagagcttggaccggctgatgaatcctctgattgaccagtacctgtactacttgtctcggactcaaacaacaggaggcacggcaaatacgcagactctgggcttcagccaaggtgggcctaatacaatggccaatcaggcaaagaactggctgccaggaccctgttaccgccaacaacgcgtctcaacgacaaccgggcaaaacaacaatagcaactttgcctggactgctgggaccaaataccatctgaatggaagaaattcattggctaatcctggcatcgctatggcaacacacaaagacgacaaggagcgtttttttcccagtaacgggatcctgatttttggcaaacaaaatgctgccagagacaatgcggattacagcgatgtcatgctcaccagcgaggaagaaatcaaaaccactaaccctgtggctacagaggaatacggtatcgtggcagataacttgcagcagcaaaacacggctcctcaaattggaactgtcaacagccagggggccttacccggtatggtctggcagaaccgggacgtgtacctgcagggtcccatctgggccaagattcctcacacggacggcaacttccacccgtctccgctgatgggcggctttggcctgaaacatcctccgcctcagatcctgatcaagaacacgcctgtacctgcggatcctccgaccaccttcaaccagtcaaagctgaactctttcatcacgcaatacagcaccggacaggtcagcgtggaaattgaatgggagctgcagaaggaaaacagcaagcgctggaaccccgagatccagtacacctccaactactacaaatctacaagtgtggactttgctgttaatacagaaggcgtgtactctgaaccccaccccattggcacccgttacctcacccgtcccctgtaa

SEQ ID NO: 1096 - DNA, 2217 bp, synthetic construct
  misc_feature 1..2217: note = source = /note="Description of Artificial Sequence: Synthetic polynucleotide"
  source 1..2217: mol_type = other DNA
atggctgccgatggttatcttccagattggctcgaggacaacctctctgagggaataagacagtggtggaagctcaaacctggcccaccaccaccaaagcccgcagagcggcataaggacgacagcaggggtcttgtgcttcctgggtacaagtacctcggacccttcaacggactcgacaagggagagccggtcaacgcggcggacgcagcggccctcgagcacgacaaggcctacgaccagcagctcaaagcgggtgacaatccgtacctgcggtataaccacgccgacgccgagtttcaggagcgtctgcaagaagatacgtcttttgggggcaacctcgggcgagcagtcttccaggccaagaagcgggttctcgaacctctcggtctggttgaggaaggcgctaagacggctcctggaaagaagagaccggtagagccatcaccccagcgttctccagactcctctacgggcatcggcaagaaaggccagcagcccgctaaaaagagactcaattttggtcagactggcgactcagagtcagtccccgacccacaacctctcggagaacctccagcaacccccgctgctgtgggacctactacaatggcttcaggcggtggcgcaccaatggcagacaataacgaaggcgccgacggagtgggtaatgcctcaggaaattggcattgcgattccacatggctgggggacagagtcatcaccaccagcacccgaacctgggccctgcccacctacaacaaccacctctacaagcaaatctccaacgggacttcgggaggaagcaccaacgacaacacctacttcggctgcgtcacgccctgggggtattttgactttaacaaattccactgccacttttcaccggatgactggcaacgactcatcaacaacggctggggattccggactaagcgactcaacttcaagctcttcagcatgaaagtcaaaaagggtacggacaacactggaatcaagaccatcgcgaataaccttaccaacacggtccatgtcttcgcggactcggagtaccagttgccgtacgtcctcggctctgcgcaccagggctgcctccctccgttcccggcggacgtgttcatgattccgcagtacggctacctaacgctcaacaatggcagccaggcagtgggacggtcatccttttactgcctggaatatttcccatcgcagatgctgagaacgggcaacaactttaccttcagctacacctttgaggacgttcctttccacagcagctacgctcacagccagagtctggaccgtctcatgaatcctctgattgaccagtacctgtactacttgtctcggactcaaacaacaggaggcacggcaaatacgcagactctgggcttcagccaaggtgggcctaatacaatggccaatcaggcaaagaactggctgccaggaccctgttaccgccaacaacgcgtctcaacgacaaccgggcaaaacaacaatagcaactttgcctggactgctgggaccaaataccatctgaatggaagaaattcattggctaatcctggcatcgctatggcaacacacaaagacgacaaggagcgtttttttcccagtaacgggatcctgatttttggcaaacaaaatgctgccagagacaatgcggattacagcgatgtcatgctcaccagcgaggaagaaatcaaaaccactaaccctgtggctacagaggaatacggtatcgtggcagataacttgcagcagcaaaacacggctcctcaaattggaactgtcaacagccagggggccttacccggtatggtctggcagaaccgggacgtgtacctgcagggtcccatctgggccaagattcctcacacggacggcaacttccacccgtctccgctgatgggcggctttggcctgaaacatcctccgcctcagatcctgatcaagaacacgcctgtacctgcggatcctccgaccaccttcaaccagtcaaagctgaactctttcatcacgcaatacagcaccggacaggtcagcgtggagatcgagtgggagctgcagaaggaaaacagcaagcgctggaacccggagatccagtacacctccaactactacaaatctacaagtgtggactttgctgttaatacagaaggcgtgtactctgaaccccaccccattggcacccgttacctcacccgtcccctgtaa

SEQ ID NO: 1097 - DNA, 2214 bp, synthetic construct
  misc_feature 1..2214: note = source = /note="Description of Artificial Sequence: Synthetic polynucleotide"
  source 1..2214: mol_type = other DNA
atggctgccgatggttatcttccagattggctcgaggacactctctctgaaggaataagacagtggtggaagctcaaacctggcccaccaccaccaaagcccgcagagcggcataaggacgacagcaggggtcttgtgcttcctgggtacaagtacctcggacccttcaacggactcgacaagggggagcccgtcaacgcggcggacgcagcggccctcgagcacgacaaggcctacgaccagcagctcaaagcgggtgacaatccgtacctgcggtataaccacgccgacgccgagtttcaggagcgtctgcaagaagatacgtcttttgggggcaacctcgggcgagcagtcttccaggccaagaagcgggttctcgaacctctcggtctggttgaggaaggcgctaagacggctcctggaaagaagagaccggtagagccatcaccccagcgttctccagactcctctacgggcatcggcaagaaaggccagcagcccgcgaaaaagagactcaactttgggcagactggcgactcagagtcagtgcccgaccctcaaccaatcggagaaccccccgcaggcccctctggtctgggatctggtacaatggctgcaggcggtggcgctccaatggcagacaataacgaaggcgccgatggagtgggtagttcctcgggaaattggcattgcgattccacatggctgggggacagagtcatcaccaccagcacccgaacctgggccctgcccacctacaacaaccacctctacaaacaaatttccagcgcttcaacgggagcctcgaacgacaatcactactttggctacagcaccccctgggggtattttgacttcaacagattccactgccacttctcaccacgtgactggcagcgactcatcaacaacaactggggattccggcctaagcgactcaacttcaagctcttcaacattcaggtcaaagaggttacggacaacaatggagtcaagaccatcgccaataaccttaccagcacggtccaggtcttcacggactcggagtaccagttgccgtacgtcctcggctctgcgcaccagggctgcctccctccgttcccggcggacgtgttcatgattccgcagtacggctacctaacgctcaacaatggcagccaggcagtgggacggtcatccttttactgcctggaatatttcccatcgcagatgctgagaacgggcaacaactttaccttcagctacacctttgaggacgttcctttccacagcagctacgctcacagccagagtctggaccgtctcatgaatcctctgattgaccagtacctgtactacttgtctcggactcaaacaacaggaggcacggcaaatacgcagactctgggcttcagccaaggtgggcctaatacaatggccaatcaggcaaagaactggctgccaggaccctgttaccgccaacaacgcgtctcaacgacaaccgggcaaaacaacaatagcaactttgcctggactgctgggaccaaataccatctgaatggaagaaattcattggctaatcctggcatcgctatggcaacacacaaagacgacaaggagcgtttttttcccagtaacgggatcctgatttttggcaaacaaaatgctgccagagacaatgcggattacagcgatgtcatgctcaccagcgaggaagaaatcaaaaccactaaccctgtggctacagaggaatacggtatcgtggcagataacctgcagcagcaaaacacggctcctcaaattggaactgtcaacagccagggggccttacccggtatggtctggcagaaccgggacgtgtacctgcagggtcccatctgggccaagattcttcacacggacggcaactttcacccttctccgctgatgggagggtttggaatgaagcacccgcctcctccgatcctgatcaagaacacgcctgtacctgcggatcctccgaccaccttcaaccagtcaaagctgaactctttcatcacgcaatacagcaccggacaggtcagcgtggaaattgaatgggagctgccgaaggaaaacagcaagcgctggaaccccgagatccagtacacctccaactactacaaatctacaagtgtggactttgctgttaatacagaaggtgtgtactatgaaccccaccccattggcacccgttacctcacccctcccctgtaa

SEQ ID NO: 1098 - DNA, 2214 bp, synthetic construct
  misc_feature 1..2214: note = source = /note="Description of Artificial Sequence: Synthetic polynucleotide"
  source 1..2214: mol_type = other DNA
atggctgccgatggttatcttccagattggctcgaggacaacctctctgagggcattcgcgagtggtgggcgctgaaacctggagccccgaagcccaaagccaaccagcaaaagcaggacgacggccggggtctggtgcttcctggctacaagtacctcggacccttcaacggactcgacaagggggagcccgtcaacgcggcggacgcagcggccctcgagcacgacaaggcctacgaccagcagctcaaagcgggtgacaatccgtacctgcggtataaccacgccgacgccgagtttcaggagcgtctgcaagaagatacgtcttttgggggcaacctcgggcgagcagtcttccaggccaagaagcgggttctcgaacctctcggtctggttgaggaaggcgctaagacggctcctggaaagaagagaccggtagagccatcaccccagcgctctccagactcctctacgggcatcggcaagaaaggccaacagcccgccagaaaaagactcaattttggtcagactggcgactcagagtcagttccagaccctcaacctctcggagaacctccagcagcgccctctggtgtggcacctaatacaatggctgcaggcggtggcgcaccaatggcagacaataacgaaggcgccgacggagtgggtaatgcctcaggaaattggcattgcgattccacatggctgggcgacagagtcatcaccaccagcacccgaacatgggccttgcccacctataacaaccacctctacaagcaaatctccagtgcttcaacgggggccagcaacgacaaccactacttcggctacagcaccccctgggggtattttgatttcaacagattccactgccacttttcaccacgtgactggcagcgactcatcacaacaattgggggattccggcctaagcgactcaacttcaagctcttcaacattcaggtcaaagaggttacggacaacaatggagtcaagaccatcgccaataaccttaccagcacggtccaggtcttcacggactcggagtaccagttgccgtacgtcctcggctctgcgcaccagggctgcctccctccgttcccggcggacgtgttcatgattccgcagtacggctacctaacgctcaacaatggcagccaggcagtgggacggtcatccttttactgcctggaatatttcccatcgcagatgctgagaacgggcaacaactttaccttcagctacacctttgaggacgttcctttccacagcagctacgctcacagccagagtctggaccggctgatgaatcctctgattgaccagtacctgtactacttgtctcggactcaaacaacaggaggcacggcaaatacgcagactctgggcttcagccaaggtgggcctaatacaatggccaatcaggcaaagaactggctgccaggaccctgttaccgccaacaacgcgtctcaacgacaaccgggcaaaacaacaatagcaactttgcctggactgctgggaccaaataccatctgaatggaagaaattcattggctaatcctggcatcgctatggcaacacacaaagacgacaaggagcgtttttttcccagtaacgggatcctgatttttggcaaacaaaatgctgccagagacaatgcggattacagcgatgtcatgctcaccagcgaggaagaaatcaaaaccactaaccctgtggctacagaggaatacggtatcgtggcagataacttgcagcagcaaaacacggctcctcaaattggaactgtcaacagccagggggccttacccggtatggtctggcagaaccgggacgtgtacctgcagggtcccatctgggccaagattcctcacacggacggcaacttccacccgtctccgctgatgggcggctttggcctgaaacatcctccgcctcagatcctgatcaagaacacgcctgtacctgcggatcctccgaccaccttcaaccagtcaaagctgaactctttcatcacgcaatacagcaccggacaggtcagcgtggaaattgaatgggagctgcagaaggaaaacagcaagcgctggaaccccgagatccagtacacctccaactactacaaatctacaagtgtggactttgctgttaatacagaaggcgtgtactctgaaccccaccccattggcacccgttacctcacccgtcccctgtaa

SEQ ID NO: 1099 - DNA, 2211 bp, synthetic construct
  misc_feature 1..2211: note = source = /note="Description of Artificial Sequence: Synthetic polynucleotide"
  source 1..2211: mol_type = other DNA
atggctgccgatggttatcttccagattggctcgaggacactctctctgaaggaataagacagtggtggaagctcaaacctggcccaccaccaccaaagcccgcagagcggcataaggacgacggccggggtctggtgcttcctggctacaagtacctcggacccttcaacggactcgacaagggggagcccgtcaacgcggcggacgcagcggccctcgagcacgacaaggcctacgaccagcagctcaaagcgggtgacaatccgtacctgcggtataaccacgccgacgccgagtttcaggagcgtctgcaagaagatacgtcttttgggggcaacctcggacgagcagtcttccaggcgaaaaagagggttcttgaacctctgggcctggttgaggaacctgttaagacggctccgggaaaaaagaggccggtagagcagtcgccacaagagccagactcctcctcgggcatcggcaagaaaggccagcagcccgctaaaaagagactcaattttggtcagactggcgactcagagtcagtccccgacccacaacctctcggagaacctccagcaacccccgctgctgtgggacctactacaatggcttcaggcggtggcgcaccaatggcagacaataacgaaggcgccgacggagtgggtaatgcctcaggaaattggcattgcgattccacatggatgggcgacagagtcatcaccaccagcacccgaacatgggccttgcccacctataacaaccacctctacaagcaaatctccagtgcttcaacgggggccagcaacgacaaccactacttcggctacagcaccccctgggggtattttgactttaacagattccactgccacttttcaccacgtgactggcagcgactcatcaacaacaactggggattccggcctaagcgactcaacttcaagctcttcaacattcaggtcaaggaggtcacgcagaatgaaggcaccaagaccatcgccaataacctcaccagcaccatccaggtgtttacggactcggagtaccagctgccgtacgttctcggctccgcccaccagggctgcctgcctccgttcccggcggacgtgttcatgatcccccagtacggctacctaacactcaacaacggtagtcaggccgtgggacgctcctccttctactgcctggaatactttccttcgcagatgctgagaaccggcaacaacttccagtttacttacaccttcgaggacgtgcctttccacagcagctacgcgcacagccagagcttggaccggctgatgaatcctctgattgaccagtacctgtactacttgtctcggactcaaacaacaggaggcacggcaaatacgcagactctgggcttcagccaaggtgggcctaatacaatggccaatcacgcaaagaactggctgccaggaccctgttaccgccaacaacgcgtctcaacgacaaccgggcaaaacaacaatagcaactttgcctggactgctgggaccaaataccatctgaatggaagaaattcattggctaatcctggcatcgctatggcaacacacaaagacgacaaggagcgtttttttcccagtaacgggatcctgatttttggcaaacaaaatgctgccagagacaatgcggattacagcgatgtcatgctcaccagcgaggaagaaatcaaaaccactaaccctgtggctacagaggaatacggtatcgtggcagataacttgcagcagcaaaacacggctcctcaaattggaactgtcaacagccagggggccttacccggtatggtctggcagaaccgggacgtgtacctgcagggtcccatctgggccaagattcctcacacggacggcaacttccacccgtctccgctgatgggcggcttcggcctgaaacatcctccgcctcagatcctgatcaagaacacgcctgtacctgcggatcctccgaccaccttcaaccagtcaaagctgaactctttcatcacgcaatacagcaccggacaggtcagcgtggaaattgaatgggagctgcagaaggaaaacagcaagcgctggaaccccgagatccagtacacctccaactactacaaatctacaagtgtggactttgctgttaatacagaaggcgtgtactctgaaccccaccccattggcacccgttacctcacccgtcccctgtaa

SEQ ID NO: 1100 - DNA, 2214 bp, synthetic construct
  misc_feature 1..2214: note = source = /note="Description of Artificial Sequence: Synthetic polynucleotide"
  source 1..2214: mol_type = other DNA
atggctgccgatggttatcttccagattggctcgaggacaacctctctcagggcattcgcgagtggtgggacttgaaacctggagccccgaaacccaaagccaaccagcaaaagcaggacgacggccggggtctggtgcttcctggctacaagtacctcggacccttcaacggactcgacaagggggagcccgtcaacgcggcggacgcagcggccctcgagcacgacaaggcctacgaccagcagctcaaagcgggtgacaatccgtacctgcggtataaccacgccgacgccgagtttcaggagcgtctgcaagaagatacgtcttttgggggcaacctcggacgagcagtcttccaggccaagaagcgggttctcgaacctctcggtctggttgaggaaggcgctaagacggctcctggaaagaagagaccggtagagccatcaccccagcgttctccagactcctctacgggcatcggcaagaaaggccaacagcccgccagaaaaagactcaattttggtcagactggcgactcagagtcagttccagaccctcaacctctcggagaacctccagcagcgcccgctgctgtgggacctactacaatggcttcaggcggtggcgcaccaatggcagacaataacgaaggcgccgacggagtgggtagttcctcgggaaattggcattgcgattcccaatggctgggggacagagtcatcaccaccagcacccgaacctgggccctgcccacctacaacaaccacctctacaagcaaatctccagtgcttcaacgggggccagcaacgacaaccactacttcggctacagcaccccctgggggtattttgacttcaacagattccactgccacttttcaccacgtgactggcaaagactcatcaacaacaactggggattccggcccaagagactcagcttcaagctcttcaacatccaggtcaaggaggtcacgcagaatgaaggcaccaagaccatcgccaataacctcaccagcaccatccaggtgtttacggactcggagtaccagctgccgtacgttctcggctctgcccaccagggctgcctgcctccgttcccggcggacgtgttcatgattccccagtacgggtacctgactctgaacaatggcagtcaggccgtgggccgttcctccttctactgcctggagtactttccttctcaaatgctgagaaccggcaacaacttccagtttacttacaccttcgaggacgtgcctttccacagcagctacgcccacagccagagcttggaccggctgatgaatcctctgattgaccagtacctgtactacttgtctcggactcaaacaacaggaggcacgacaaatgcgcagactctgggcttcagccaaggtgggcctaatacaatggccaatcaggcaaagaactggctgccaggaccctgttaccgccaacaacgcgtctcaacgacaaccgggcaaaacaacaatagcaactttgcctggactgctgggaccaaataccatctgaatggaagaaattcattggctaatcctggcatcgctatggcaacacacaaagacgacaaggagcgtttttttcccagtaacgggatcctgatttttggcaaacaaaatgctgccagagacaatgcggattacagcgatgtcatgctcaccagcgaggaagaaatcaaaaccactaaccctgtggctacagaggaatacggtatcgtggcagataacttgcagcagcaaaacacggctcctcaaattggaactgtcaacagccagggggccttacccggtatggtctggcagaaccgggacgtgtacctgcagggtcccatctgggccaagattcctcacacggacggcaacttccacccgtctccgctgatgggcggctttggcctgaaacatcctccgcctcagatcctgatcaagaacacgcctgtacctgcggatcctccgaccaccttcaaccagtcaaagctgaactctttcatcacacagtactccacgggacaggtcagcgtggaaattgaatgggagctgcagaaggaaaacagcaagcgctggaacccggagatccagtacacttccaactactacaaatctacaaatgtggactttgctgttaacacagaaggcgtgtactctgaaccccaccccattggcacccgttacctcacccgtcccctgtaa

SEQ ID NO: 1101 - DNA, 2211 bp, synthetic construct
  misc_feature 1..2211: note = source = /note="Description of Artificial Sequence: Synthetic polynucleotide"
  source 1..2211: mol_type = other DNA
atggctgccgatggttatcttccagattggctcgaggacaacctctctgagggcattcgcgagtggtgggacttgaaacctggagccccgaaacccaaagccaaccagcaaaagcaggacgacggccggggtctggtgcttcctggctacaagtacctcggacccttcaacggactcgacaagggggagcccgtcaacgcggcggacgcagcggccctcgagcacgacaaggcctacgaccagcagctcaaagcgggtgacaatccgtacctgcggtataaccacgccgacgccgagtttcaggagcgtctgcaagaagatacgtcttttgggggcaacctcgggcgagcagtcttccaggccaagaagagggttctcgaaccttttggtctggttgaggaaggcgctaagacggctcctggaaagaaacgtccggtagagcagtcgccacaagagccagactcctcctcgggcatcggcaagacaggccagcagcccgctaaaaagagactcaatttcggtcagactggcgacacagagtcagtcccagaccctcaaccaatcggagaacctcccgcagccccctcaggtgtgggacctaatacaatggctgcaggcggtggcgcaccaatggcagacaataacgaaggcgccgacggagtgggtagttcctcgggaaattggcattgcgattccacatggatgggtgacagagtcatcaccaccagcacccgaacctgggccctgcccacctacaataaccacctctacaagcaaatctccagtgcttcaacgggggccagcaacgacaaccactacttcggctacagcaccccctgggggtattttgacttcaacagattccactgccacttctcaccacgtgactggcagcgactcatcaacaacaactggggattccggcctaagcgactcaacttcaagctcttcaacattcaggtcaaggaggtcacgcagaatgaaggcaccaagaccatcgccaataacctcaccagcaccatccaggtgtttacggactcggagtaccagctgccgtacgttctcggctctgcccaccagggctgcctgcctccgttcccggcggacgtgttcatgattccccagtacggctacctaacactcaacaacggtagtcaggccgtgggacgctcctccttctactgcctggaatactttccttcgcagatgctgagaaccggcaacaacttccagtttacttacaccttcgaggacgtgcctttccacagcagctacgcccacagccagagcttggaccggctgatgaatcctctgattgaccagtacctgtactacttgtctcggactcaaacaacaggaggcacggcaaatacgcagactctgggcttcagccaaggtgggcctaatacaatggccaatcaggcaaagaactggctgccaggaccctgttaccgccaacaacgcgtctcaacgacaaccgggcaaaacaacaatagcaactttgcctggactgctgggaccaaataccatctgaatggaagaaattcattggctaatcctggcatcgctatggcaacacacaaagacgacaaggagcgtttttttcccagtaacgggatcctgatttttggcaaacaaaatgctgccagagacaatgcggattacagcgatgtcatgctcaccagcgaggaagaaatcaaaaccactaaccctgtggctacagaggaatacggtatcgtggcagataacttgcagcagcaaaacacggctcctcaaattggaactgtcaacagccagggggccttacccggtatggtctggcagaaccgggacgtgtacctgcagggtcccatctgggccaagattcctcacacggacggcaacttccacccgtctccgctgatgggcggctttggcctgaaacatcctccgcctcagatcctgatcaagaacacgcctgtacctgcggatcctccgaccaccttcaaccagtcaaagctgaactctttcatcacacagtactccacgggacaggtcagcgtggaaattgaatgggagctgcagaaggaaaacagcaagcgctggaacccggagatccagtacacttccaactactacaaatctacaaatgtggactttgctgttaacacagaaggcgtgtactctgaaccccaccccattggcacccgttacttcacccgtcccctgtaa

SEQ ID NO: 1102 - DNA, 2211 bp, synthetic construct
  misc_feature 1..2211: note = source = /note="Description of Artificial Sequence: Synthetic polynucleotide"
  source 1..2211: mol_type = other DNA
atggctgccgatggttatcttccagattggctcgaggacaacctctctgagggcattcgcgagtggtgggacttgaaacctggagccccgaaacccaaagccaaccagcaaaagcaggacgacggccggggtctggtgcttcctggctacaagtacctcggacccttcaacggactcgacaagggggagcccgtcaacgcggcggacgcagcggccctcgagcacgacaaggcctacgaccagcagctcaaagcgggtgacaatccgtacctgcggtataaccacgccgacgccgagtttcaggagcgtctgcaagaagatacgtcttttgggggcaacctcgggcgagcagtcttccaggccaagaagcgggttctcgaacctctcggtctggttgaggaaggcgctaagacggctcctggaaagaaacgtccggtagagcagtcgccacaagagccagactcctcctcgggcatcggcaagacaggccagcagcccgctaaaaaaagactcaattttggtcagactggcgactcagagtcagttccagaccctcaacctctcggagaacctccagcaacccccgctgctgtgggacctactacaatggcttcaggtggtggcgcaccaatggcagacaataacgagggcgccgacggagtgggtaattcctcgggaaattggcattgcgattccacatggatgggcgacagagtcatcaccaccagcacccgaacctgggccctgcccacctacaacaatcacctctacaagcaaatctccagtgcttcaacgggggccagcaacgacaaccactacttcggctacagcaccccctgggggtattttgacttcaacagattccactgccacttctcaccacgtgactggcagcgactcatcaacaacaactggggattccggcctaagcgactcaacttcaagctcttcaacattcaggtcaaagaggttacggacaacaatggagtcaagaccatcgccaataaccttaccagcacggtccaggtcttcacggactcggagtaccagttgccgtacgtcctcggctctgcgcaccagggctgcctccctccgttcccggcggacgtgttcatgattccgcagtacggctacctaacgctcaacaacggtagtcaggccgtgggacgctcctccttctactgcctggaatactttccttcgcagatgctgagaaccggcaacaacttccagtttacttacaccttcgaggacgtgcctttccacagcagctacgcccacagccagagcttggaccggctgatgaatcctctgattgaccagtacctgtactacttgtctcggactcaaacaacaggaggcacggcaaatacgcagactctgggcttcagccaaggtgggcctaatacaatggccaatcaggcaaagaactggctgccaggaccctgttaccgccaacaacgcgtctcgacgacaaccgggcaaaacaacaatagcaactttgcctggactgctgggaccaaataccatctgaatggaagaaattcattggctaatcctggcatcgctatggcaacacacaaagacgacaaggagcgtttttttcccagtaacgggatcctgatttttggcaaacaaaatgctgccagagacaatgcggattacagcgatgtcatgctcaccagcgaggaagaaatcaaaaccactaaccctgtggctacagaggaatacggtatcgtggcagataacttgcagcagcaaaacacggctcctcaaattggaactgtcaacagccagggggccttacccggtatggtttggcagaaccgggacgtgtacctgcagggtcccatctgggccaagattcctcacacggacggcaacttccacccgtctccgctgatgggcggctttggcctgaaacatcctccgcctcagatcctgatcaagaacacgcctgtacctgcggatcctccgaccaccttcaaccagtcaaagctgaactctttcatcacacagtactccacgggacaggtcagcgtggaaattgaatgggagctgcagaaggaaaacagcaagcgctggaacccggagatccagtacacttccaactactacaaatctacaaatgtggactttgctgttaacacagaaggcgtgtactctgaaccccaccccattggcacccgttacctcacccgtcccctgtaa

SEQ ID NO: 1103 - DNA, 2211 bp, synthetic construct
  misc_feature 1..2211: note = source = /note="Description of Artificial Sequence: Synthetic polynucleotide"
  source 1..2211: mol_type = other DNA
atggctgccgatggttatcttccagattggctcgaggacaacctctctgagggcattcgcgagtggtgggacttgaaacctggagccccgaagcccaaagccaaccagcaaaagcaggacgacggccggggtctggtgcttcctggctacaagtacctcggacccttcaacggactcgacaagggggagcccgtcaacgcggcggacgcagcggccctcgagcacgacaaggcctacgaccagcagctcaaagcgggtgacaatccgtacctgcggtataaccacgccgacgccgagtttcaggagcgtctgcaagaagatacgtcttttgggggcaacctcgggcgagcagtcttccaggccaagaagcgggttctcgaacctctcggtctggttgaggaaggcgctaagacggctcctggaaagaaacgtccggtagagcagtcaccacaagagccagactcctcctcgggcatcggcaagacaggccagcagcccgctaaaaagagactcaattttggtcagactggcgactcagagtcagtccccgacccacaacctctcggagaacctccagcaacccccgctgctgtgggacctactacaatggcttcaggcggtggcgcaccaatggcggacaataacgaaggcgccgatggagtgggtaatgcctcaggaaattggcattgcgattccacatggctgggcgacagagtcatcaccaccagcacccgaacatgggccttgcccacctataacaaccacctctacaagcaaatctccagtgcttcaacgggggccagcaacgacaaccactacttcggctacagcaccccctgggggtattttgactttaacagattccactgccacttctcaccacgtgactggcagcgactcatcaacaacaactggggattccggcccaagagactcaacttcaagctcttcaacatccaggtcaaggaggtcacgcagaatgaaggcaccaagaccatcgccaataacctcaccagcaccatccaggtgtttacggactcggagtaccagctgccgtacgttctcggctctgcccaccagggctgcctgcctccgttcccggcggacgtgttcatgattccccagtacggctacctgactctgaacaatggcagtcaggccgtgggccgttcctccttctactgcctagagtactttccttctcaaatgctgagaacgggcaacaactttgagttcagctaccagtttgaggacgtgccttttcacagcagctacgcgcacagccaaagcctggaccggctgatgaatcctctgattgaccagtacctgtactacttgtctcggactcaaacaacaggaggcacggcaaatacgcagactctgggcttcagccaaggtgggcctaatacaatggccaatcaggcaaagaactggctgccaggaccctgttaccgccaacaacgcgtctcaacgacaaccgggcaaaacaacaatagcaactttgcctggactgctgggaccaaataccatatgaatggaagaaattcattggttaatcctggcatcgctatggcaacacacaaagacgacaaggagcgtttttttcccagtaacgggatcctgatttttggcaaacaaaatgttgccagagacaatgcggattacagcgatgtcatgctcaccagcgaggaagaaatcaaaaccactaaccctgtggctacagaggaatacggtattgtggcagataacttgcagcagcaaaacacggctcctcaaattggaactgtcaacagccagggggccttacccggtatggtctggcagaaccgggacgtgtacctgcagggtcccatctgggccaagattcctcacacggacggcaacttccacccgtcgccgctgatgggcggctttggcctgaaacatcctccgcctcagatcctgatcaagaacacgcctgtacctgcggatcctccgaccaccttcaaccagtcaaagctgaactctttcatcacgcaatacagcaccggacaggtcagcgtggaaattgaatgggagctgcagaaggaaaacagcaagcgctggaaccccgagatccagtacacctccaactactacaaatctacaagtgtggactttgctgttaatacagaaggcgtgtactctgaaccccaccccattggcacccgttacctcacccgtcccctgtaa

SEQ ID NO: 1104 - protein, 736 aa, synthetic construct
  REGION 1..736: note = source = /note="Description of Artificial Sequence: Synthetic polypeptide"
MAADGYLPDWLEDTLSEGIRQWWKLKPGPPPPKPAERHKDDSRGLVLPGYKYLGPFNGLDKGEPVNEADAAALEHDKAYDRQLDSGDNPYLKYNHADAEFQERLKEDTSFGGNLGRAVFQAKKRVLEPLGLVEEPVKTAPGKKRPVEQSPQEPDSSSGIGKKGQQPAKKRLNFGQTGDSESVPDPQPLGEPPATPAAVGPTTMASGGGAPMADNNEGADGVGNASGNWHCDSTWMGDRVITTSTRTWALPTYNNHLYKQISSASTGASNDNHYFGYSTPWGYFDFNRFHCHFSPRDWQRLINNNWGFRPKRLNFRLFNIQVKEVTDNNGVKTIANNLTSTVQVFTDSEYQLPYVLGSAHQGCLPPFPADVFMIPQYGYLTLNNGSQAVGRSSFYCLEYFPSQMLRTGNNFTFSYTFEEVPFHSSYAHSQSLDRLMNPLIDQYLYYLSRTQTTGGTANTQTLGFSQGGPNTMANQAKNWLPGPCYRQQRVSTTTGQNNNSNFAWTAGTKYHLNGRNSLANPGIAMATHKDDKERFFPSNGILIFGKQNAARDNADYSDVMLTSEEEIKTTNPVATEEYGIVADNLQQQNTAPQIGTVNSQGALPGMVWQNRDVYLQGPIWAKIPHTDGNFHPSPLMGGFGLKHPPPQILIKNTPVPADPPTTFNQSKLNSFITQYSTGQVSVEIEWELQKENSKRWNPEIQYTSNYYKSTSVDFAVNTEGVYSEPHPIGTRYLTRPL

SEQ ID NO: 1105 - protein, 736 aa, synthetic construct
  REGION 1..736: note = source = /note="Description of Artificial Sequence: Synthetic polypeptide"
MAADGYLPDWLEDNLSEGIREWWDLKPASPKPKANQQKQDDGRGLVLPGYKYLGPFNGLDKGEPVNAADAAALEHDKAYDQQLKAGDNPYLRYNHADAEFQERLQEDTSFGGNLGRAVFQAKKRLLEPLGLVEEAAKTAPGKKRPVEQSPQEPDSSAGIGKSGAQPAKKRLNFGQTGGTESVPDPQPLGEPPAAPSGVGPNTMAAGGGAPMADNNEGADGVGSSSGNWHCDSTWLGDRVITTSTRTWALPTYNNHLYKQISSASTGASNDNHYFGYSTPWGYFDFNRFHCHFSPRDWQRLINNNWGFRPKRLSFKLFNIQVKEVTQNEGTKTIANNLTSTIQVFTDSEYQLPYVLGSAHQGCLPPFPADVFMIPQYGYLTLNNGSQAVGRSSFYCLEYFPSQMLRTGNNFQFTYTFEDVPFHSSYAHSQSLDRLMNPLIDQYLYYLSRTQTTGGTANTQTLGFSQGGPNTMANQAKNWLPGPCYRQQRVSTTTGQNNNSNFAWTAGTKYHLNGRNSLANPGIAMATHKDDKERFFPSNGILIFGKQNAARDNADYSDVMLTSEEEIKTTNPVATEEYGIVADNLQQQNTAPQIGTVNSQGALPGMVWQNRDVYLQGPIWAKIPHTDGNFHPSPLMGGFGLKHPPPQILIKNTPVPADPPTTFNQSKLNSFITQYSTGQVSVEIEWELQKENSKRWNPEIQYTSNYYKSTSVDFAVNTEGVYSEPHPIGTRYLTRPL

SEQ ID NO: 1106 - protein, 736 aa, synthetic construct; identical to SEQ ID NO: 1045
  REGION 1..736: note = source = /note="Description of Artificial Sequence: Synthetic polypeptide"

SEQ ID NO: 1107 - protein, 736 aa, synthetic construct
  REGION 1..736: note = source = /note="Description of Artificial Sequence: Synthetic polypeptide"
MAADGYLPDWLEDNLSEGIREWWDLEPGAPKPKANQQKQDDGRGLVLPGYKYLGPFNGLDKGEPVNAADAAALEHDKAYDQQLKAGDNPYLRYNHADAEFQERLQEDTSFGGNLGRAVFQAKKRVLEPLGLVEEGAKTAPGKKRPVEQSPQEPDSSSGIGKTGQQPAKKRLNFGQTGDSESVPDPQPLGEPPATPAAVGPTTMASGGGAPMADNNEGADGVGNASGNWHCDSTWLGDRVITTSTRTWALPTYNNHLYKQISSASTGASNDNHYFGYSTPWGYFDFNRFHCHFSPRDWQRLINNNWGFRPKRLNFKLFNIQVKEVTDNNGVKTIANNLTSTVQVFTDSEYQLPYVLGSAHQGCLPPFPADVFMIPQYGYLTLNNGSQAVGRSSFYCLEYFPSQMLRTGNNFQFTYTFEDVPFHSSYAHSQSLDRLMNPLIDQYLYYLSRTQTTGGTANTQTLGFSQGGPNTMANQAKNWLPGPCYRQQRVSTTTGQNNNSNFAWTAGTKYHLNGRNSLANPGIAMATHKDDKERFFPSNGILIFGKQNAARDNADYSDVMLTSEEEIKTTNPVATEEYGIVADNLQQQNTAPQIGTVNSQGALPGMVWQNRDVYLQGPIWAKIPHTDGNFHPSPLMGGFGLKHPPPQILIKNTPVPADPPTTFNQSKLNSFITQYSTGQVSVEIEWELQKENSKRWNPEIQYTSNYYKSTSVDFAVNTEGVYSEPHPIGTRYLTRPL

SEQ ID NO: 1108 - protein, 736 aa, synthetic construct; identical to SEQ ID NO: 1045
  REGION 1..736: note = source = /note="Description of Artificial Sequence: Synthetic polypeptide"

SEQ ID NO: 1109 - protein, 736 aa, synthetic construct
  REGION 1..736: note = source = /note="Description of Artificial Sequence: Synthetic polypeptide"
MAADGYLPDWLEDTLSEGIRQWWKLKPGPPPPKPAERHKDDSRGLVLPGYKYLGPFNGLDKGEPVNEADAAALEHDKAYDRQLDSGDNPYLKYNHADAEFQERLKEDTSFGGNLGRAVFQAKKRVLEPLGLVEEPVKTAPGKKRPVEQSPQEPDSSSGIGKKGQQPAKKRLNFGQTGDSESVPDPQPLGEPPATPAAVGPTTMASGGGAPMADNNEGADGVGNASGNWHCDSTWLGDRVITTSTRTWALPTYNNHLYKQISSASTGASNDNHYFGYSTPWGYFDFNRFHCHFSPRDWQRLINNNWGFRPKRLNFKLFNIQVKEVTDNNGVKTIANNLTSTVQVFTDSDYQLPYVLGSAHQGCLPPFPADVFMIPQYGYLTLNNGSQAVGRSSFYCLEYFPSQMLRTGNNFQFTYTFEDVPFHSSYAHSQSLDRLMNPLIDQYLYYLSRTQTTGGTANTQTLGFSQGGPNTMANQAKNWLPGPCYRQQRVSTTTGQNNNSNFAWTAGTKYHLNGRNSLANPGIAMATHKDDKERFFPSNGILIFGKQNAARDNADYSDVMLTSEEEIKTTNPVATEEYGIVADNLQQQNTAPQIGTVNSQGALPGMVWQNRDVYLQGPIWAKIPHTDGNFHPSPLMGGFGLKHPPPQILIKNTPVPADPPTTFNQSKLNSFITQYSTGQVSVEIEWELQKENSKRWNPEIQYTSNYYKSTSVDFAVNTEGVYSEPHPIGTRYLTRPL

SEQ ID NO: 1110 - protein, 734 aa, synthetic construct
  REGION 1..734: note = source = /note="Description of Artificial Sequence: Synthetic polypeptide"
MAADGYLPDWLEDTLSEGIRQWWKLKPGPPPPKPAERHKDDSRGLVLPGYKYLGPFNGLDKGEPVNEADAAALEHDKAYDQQLQAGDNPYLRYNHADAEFQERLQGDTSFGGNLGRAVFQAKKRLLEPLGLVEEAAKTAPGKKRPVEQSPQEPDSSAGIGKSGAQPAKKRLNFGQTGDTESVPDPQPIGEPPAAPSGVGSLTMASGGGAPVADNNEGADGVGSSSGNWHCDSQWLGDRVITTSTRTWALPTYNNHLYKQISSASTGASNDNHYFGYSTPWGYFDFNRFHCHFSPRDWQRLINNNWGFRPKRLSFKLFNHPGQGGHAERHQDHRQPHQHIQVFTDSEYQLPYVLGSAHQGCLPPFPADVFMIPQYGYLTLNNGSQAVGRSSFYCLEYFPSQMLRTGNNFQFTYTFEDVPFHSSYAHSQSLDRLMNPLIDQYLYYLSRTQTTGGTANTQTLGFSQGGPNTMANQAKNWLPGPCYRQQRVSTTTGQNNNSNFAWTAGTKYHLNGRNSLGNPGIAMATHKDDKERFFPSNGILIFGKQNAARDNADYSDVMLTSEEEIKTTNPVATEEYGIVADNLQQQNTAPQIGTVNSQGALPGMVWQNRDVYLQGPIWAKIPHTDGNFHPSPLMGGFGLKHPPPQILIKNTPVPADPPTAFNQSKLNSFITQYSTGQVSVEIEWELQKENSKRWNPEIQYTSNYYKSTSVDFAVNTEGVYSEPHPIGTRYLTRPL

SEQ ID NO: 1111 - protein, 737 aa, synthetic construct
  REGION 1..737: note = source = /note="Description of Artificial Sequence: Synthetic polypeptide"
MAADGYLPDWLEDNLSEGIREWWDLKHGAPKPKANQQKQDDGRGLVLPGYKYLGPFNGLDKGEPVNAADAAALEHDKAYDQQLKAGDNPYLRYNHADAEFQERLQEDTSFGGNLGRAVFQAKKRVLEPFGLVEEGAKTAPGKKRPVEQSPQEPDSSSGIGKTGQQPAKKRLNFGQTGDSESVPDPQPLGEPPATPAAVGPTTMASGGGAPMADNNEGADGVGNASGNWHCDSTWLGDRVITTSTRTWALPTYNNHLYKQISNGTSGGSTNDNTYFGYSTPWGYFDFNRFHCHFSPRDWQRLINNNWGFRPKRLNFKLFNIQVKEVTQNEGTKTIANNLTSTIQVFTDSEYQLPYVLGSAHQGCLPPFPADVFMIPQYGYLTLNNGSQAVGRSSFYCLEYFPSQMLRTGNNFTFSYTFEDVPFHSSYAHSQSLDRLMNPLIDQYLYYLSRTQTTGGTANTQTLGFSQGGPNTMANQAKNWLPGPCYRQQRVSTTTGQNNNSNFAWTAGTKYHLNGRNSLANPGIAMATHKDDKERFFPSNGILIFGKQNAARDNADYSDVMLTSEEEIKTTNPVATEEYGIVADNLQQQNTAPQIGTVNSQGALPGMVWQNRDVYLQGPIWAKIPHTDGNFHPSPLMGGFGLKHPPPQILIKNTPVPADPPTTFNQSKLNSFITQYSTGQVSVEIEWELQKENSKRWNPEIQYTSNYYKSTSVDFAVNTEGVYSDPHPIGTRYLTRPL

SEQ ID NO: 1112 - protein, 737 aa, synthetic construct
  REGION 1..737: note = source = /note="Description of Artificial Sequence: Synthetic polypeptide"
MAADGYLPDWLEDNLSEGIREWWALKPGAPKPKANQQKQDDGRGLVLPGYKYLGPFNGLDKGEPVNEADAAALEHDKAYDQQLKAGDNPYLRYNHADAEFQERLQEDTSFGGNLGRAVFQAKKRVLEPLGLVEEGAKTAPGKKRPVEPSPQRSPDSSTGIGKKGQQPARKRLNFGQTGDSESVPDPQPLGEPPAAPSGVGPNTMASGGGAPMADNNEGADGVGNSSGNWHCDSTWMGDRVITTSTRTWALPTYNNHLYKQISSASTGASNDNHYFGYSTPWGYFDFNRFHCHFSPRDWQRLINNNWGFRPKRLNFKLFNIQVKEVTQNEGTKTIANNLTSTIQVFTDSEYQLPYVLGSAHQGCLPPFPADVFMIPQYGYLTLNNGSQAVGRSSFYCLEYFPSQMLRTGNNFQFTYTFEDVPFHSSYAHSQSLDRLMNPLIDQYLYYLSRTQTTGGTANTQTLGFSQGGPNTMANQAKNWLPGPCYRQQRVSTTTGQNNNSNFAWTAGTKYHLNGRNSLANPGIAMATHKDDKERFFPSNGILIFGKQNAARDNADYSDVMLTSEEEIKTTNPVATEEYGIVADNLQQQNTAPQIGTVNSQGALPGMVWQNRDVYLQGPIWAKIPHTDGNFHPSPLMGGFGLKHPPPQILIKNTPVPADPPTTFNQSKLNSFITQYSTGQVSVEIEWELQKENSKRWNPEIQYTSNYYKSTSVDFAVNTEGVYSEPHPIGTRYLTRPL

SEQ ID NO: 1113 - protein, 736 aa, synthetic construct
  VARIANT 226: note = MOD_RES - Any naturally occurring amino acid
  REGION 1..736: note = source = /note="Description of Artificial Sequence: Synthetic polypeptide"
MAADGYLPDWLEDTLSEGIRQWWKLKPGPPPPKPAERHKDDSRGLVLPGYKYLGPFNGLDKGEPVNEADAAALEHDKAYDRQLDSGDNPYLKYNHADAEFQERLKEDTSFGGNLGRAVFQAKKRVLEPLGLVEEPVKTAPGKKRPVEQSPQEPDSSSGIGKKGQQPAKKRLNFGQTGDSESVPDPQPLGEPPATPAAVGPTTMASGGGAPMADNNEGADGVGNASXNWHCDSTWLGDRVITTSTRTWALPPITTTSTSKSPVLQRGRSNDNHYFGYSTPWGYFDFNRFHCHFSPRDWQRLINNNWGFRPKRLNFKLFNIQVKEVTDNNGVKTIANNLTSTVQVFTDSDYQLPYVLGSAHQGCLPPFPADVFMIPQYGYLTLNNGSQAVGRSSFYCLEYFPSQMLRTGNNFQFTYTFEDVPFHSSYAHSQSLDRLMNPLIDQYLYYLSRTQTTGGTANTQTLGFSQGGPNTMANQAKNWLPGPCYRQQRVSTTTGQNNNSNFAWTAGTKYHLNGRNSLANPGIAMATHKDDKERFFPSNGILIFGKQNAARDNADYSDVMLTSEEEIKTTNPVATEEYGIVADNLQQQNTAPQIGTVNSQGALPGMVWQNRDVYLQGPIWAKIPHTDGNFHPSPLMGGFGLKHPPPQILIKNTPVPADPPTTFNQSKLNSFITQYSTGQVSVEIEWELQKENSKRWNPEIQYTSNYYKSTNVDFAVNTEGVYSEPHPIGTRYLTRPL

SEQ ID NO: 1114 - protein, 736 aa, synthetic construct
  VARIANT 239: note = MOD_RES - Any naturally occurring amino acid
  REGION 1..736: note = source = /note="Description of Artificial Sequence: Synthetic polypeptide"
MAADGYLPDWLEDNLSEGIREWWDLKPGAPKPKANQQKQDDGRGLVLPGYKYLGPFNGLDKGEPVNAADAAALEHDKAYDQQLQAGDNPYLRYNHADAEFQERLQGDTSFGGNLGRAVFQAKKRVLEPLGLVEEAAKTAPGKKRPVEQSPQEPDSSAGIGKSGAQPAKKRLNFGQTGDTESVPDPQPIGEPPAAPSGVGPNTMAAGGGAPMADNNEGADGVGSSSGNWHCDSTWLGDRXITTSTRTWALPTYNNHLYKQISSASTGASNDNHYFGYSTPWGYFDFNRFHCHFSPRDWQRLINNNWGFRPKRLNFKLFNIQVKEVTDNNGVKTIANNLTSTVQVFTDSEYQLPYVLGSAHQGCLPPFPADVFMIPQYGYLTLNNGSQAVGRSSFYCLEYFPSQMLRTGNNFTFSYTFEDVPFHSSYAHSQSLDRLMNPLIDQYLYYLSRTQTTGGTANTQTLGFSQGGPNTMANQAKNWLPGPCYRQQRVSTTTGQNNNSNFAWTAGTKYHLNGRNSLANPGIAMATHKDDKERFFPSNGILIFGKQNAARDNADYSDVMLTSEEEIKTTNPVATEEYGIVADNFQQQNTAPQIGTVNSQGALPGMVWQNRDVYLQGPIWAKIPHTDGNFHPSPLMGGFGLKHPPPQILIKNTPVPADPPTTFNQSKLNSFITQYSTGQVSVEIEWELQKENSKRWNPEIQYTSNYYKSTSVDFAVNTEGVYSEPHPIGTRYLTRPL

SEQ ID NO: 1115 - protein, 736 aa, synthetic construct
  REGION 1..736: note = source = /note="Description of Artificial Sequence: Synthetic polypeptide"
MAADGYLPDWLEDNLSEGIREWWALKPGAPKPKANQQKQDDGRGLVLPGYKYLGPFNGLDKGEPVNEADAAALEHDKAYDQQLKAGDNPYLKYNHADAEFQERLQEDTSFGGNLGRAVFQAKKRLLEPLGLVEEAAKTAPGKKRPVEQSPQEPDSSAGIGKSGAQPAKKRLNFGQTGDTESVPDPQPLGEPPATPAAVGPTTMASGGGAPMADNNEGADGVGNASGNWHCDSTWLGDRVITTSTRTWALPTYNNHLYKQISSASTGASNDNHYFGYSTPWGYFDFNRFHCHFSPRDWQRLINNNWGFRPKRLSFKLFNIQVKEVTQNEGTKTIANNLTSTIQVFTDSEYQLPYVLGSAHQGCLPPFPADVFMIPQYGYLTLNNGSQAVGRSSFYCLEYFPSQMLRTGNNFQFTYTFEDVPFHSSYAHSQSLDRLMNPLIDQYLYYLSRTQTTGGTANTQTLGFSQGGPNTMANQAKNWLPGPCYRQQRVSTTTGQNNNSNFAWTAGTKYHLNGRNSLANPGIAMATHKDDKERFFPSNGILIFGKQNAARDNADYSDVMLTSEEEIKTTNPVATEEYGIVADNLQQQNTAPQIGTVNSQGALPGMVWQNRDVYLQGPIWAKIPHTDGNFHPSPLMGGFGLKHPPPQILIKNTPVPADPPTTFNQSKLNSFITQYSTGQVSVEIEWELQKENSKRWNPEIQYTSNYYKSTSVDFAVNTEGVYSEPHPIGTRYLTRPL

SEQ ID NO: 1116 - protein, 736 aa, synthetic construct
  REGION 1..736: note = source = /note="Description of Artificial Sequence: Synthetic polypeptide"
MAADGYLPDWLEDTLSEGIRQWWKLKPGPPPPKPAERHKDDSRGLVLPGYKYLGPFNGLDKGEPVNEADAAALEHDKAYDQQLQAGDNPYLRYNHADAEFQERLQGDTSFGGNLGRAVFQAKKRLLEPLGLVEEAAKTAPGKKRPVEQSPQEPDSSAGIGKSGAQPAKKRLNFGQTGDTESVPDPQPIGEPPAAPSGVGSLTMASGGGAPVADNNEGADGVGSSSGNWHCDSQWLGDRVITTSTRTWALPTYNNHLYKQISSASTGASNDNHYFGYSTPWGYFDFNRFHCHFSPRDWQRLINNNWGFRPKRLSFKLFNIQVKEVTQNEGTKTIANNLTSTIQVFTDSEYQLPYVLGSAHQGCLPPFPADVFMIPQYGYLTLNNGSQAVGRSSFYCLEYFPSQMLRTGNNFQFTYTFEDVPFHSSYAHSQSLDRLMNPLIDQYLYYLSRTQTTGGTANTQTLGFSQGGPNTMANQAKNWLPGPCYRQQRVSTTTGQNNNSNFAWTAGTKYHLNGRNSLANPGIAMATHKDDKERFFPSNGILIFGKQNAARDNADYSDVMLTSEEEIKTTNPVATEEYGIVADNLQQQNTAPQIGTVNSQGALPGMVWQNRDVYLQGPIWAKIPHTDGNFHPSPLMGGFGLKHPPPQILIKNTPVPADPPTTFNQSKLNSFITQYSTGQVSVEIEWELQKENSKRWNPEIQYTSNYYKSTSVDFAVNTEGVYSEPHPIGTRYLTRPL

SEQ ID NO: 1117 - protein, 738 aa, synthetic construct
  REGION 1..738: note = source = /note="Description of Artificial Sequence: Synthetic polypeptide"
MAADGYLPDWLEDNLSEGIRQWWKLKPGPPPPKPAERHKDDSRGLVLPGYKYLGPFNGLDKGEPVNAADAAALEHDKAYDQQLKAGDNPYLRYNHADAEFQERLQEDTSFGGNLGRAVFQAKKRVLEPLGLVEEGAKTAPGKKRPVEPSPQRSPDSSTGIGKKGQQPAKKRLNFGQTGDSESVPDPQPLGEPPATPAAVGPTTMASGGGAPMADNNEGADGVGNASGNWHCDSTWLGDRVITTSTRTWALPTYNNHLYKQISNGTSGGSTNDNTYFGCVTPWGYFDFNKFHCHFSPDDWQRLINNGWGFRTKRLNFKLFSMKVKKGTDNTGIKTIANNLTNTVHVFADSEYQLPYVLGSAHQGCLPPFPADVFMIPQYGYLTLNNGSQAVGRSSFYCLEYFPSQMLRTGNNFTFSYTFEDVPFHSSYAHSQSLDRLMNPLIDQYLYYLSRTQTTGGTANTQTLGFSQGGPNTMANQAKNWLPGPCYRQQRVSTTTGQNNNSNFAWTAGTKYHLNGRNSLANPGIAMATHKDDKERFFPSNGILIFGKQNAARDNADYSDVMLTSEEEIKTTNPVATEEYGIVADNLQQQNTAPQIGTVNSQGALPGMVWQNRDVYLQGPIWAKIPHTDGNFHPSPLMGGFGLKHPPPQILIKNTPVPADPPTTFNQSKLNSFITQYSTGQVSVEIEWELQKENSKRWNPEIQYTSNYYKSTSVDFAVNTEGVYSEPHPIGTRYLTRPL

SEQ ID NO: 1118 - protein, 737 aa, synthetic construct
  REGION 1..737: note = source = /note="Description of Artificial Sequence: Synthetic polypeptide"
MAADGYLPDWLEDTLSEGIRQWWKLKPGPPPPKPAERHKDDSRGLVLPGYKYLGPFNGLDKGEPVNAADAAALEHDKAYDQQLKAGDNPYLRYNHADAEFQERLQEDTSFGGNLGRAVFQAKKRVLEPLGLVEEGAKTAPGKKRPVEPSPQRSPDSSTGIGKKGQQPAKKRLNFGQTGDSESVPDPQPIGEPPAGPSGLGSGTMAAGGGAPMADNNEGADGVGSSSGNWHCDSTWLGDRVITTSTRTWALPTYNNHLYKQISSASTGASNDNHYFGYSTPWGYFDFNRFHCHFSPRDWQRLINNNWGFRPKRLNFKLFNIQVKEVTDNNGVKTIANNLTSTVQVFTDSEYQLPYVLGSAHQGCLPPFPADVFMIPQYGYLTLNNGSQAVGRSSFYCLEYFPSQMLRTGNNFTFSYTFEDVPFHSSYAHSQSLDRLMNPLIDQYLYYLSRTQTTGGTANTQTLGFSQGGPNTMANQAKNWLPGPCYRQQRVSTTTGQNNNSNFAWTAGTKYHLNGRNSLANPGIAMATHKDDKERFFPSNGILIFGKQNAARDNADYSDVMLTSEEEIKTTNPVATEEYGIVADNLQQQNTAPQIGTVNSQGALPGMVWQNRDVYLQGPIWAKILHTDGNFHPSPLMGGFGMKHPPPPILIKNTPVPADPPTTFNQSKLNSFITQYSTGQVSVEIEWELPKENSKRWNPEIQYTSNYYKSTSVDFAVNTEGVYYEPHPIGTRYLTPPL

SEQ ID NO: 1119 - protein, 737 aa, synthetic construct
  REGION 1..737: note = source = /note="Description of Artificial Sequence: Synthetic polypeptide"
MAADGYLPDWLEDNLSEGIREWWALKPGAPKPKANQQKQDDGRGLVLPGYKYLGPFNGLDKGEPVNAADAAALEHDKAYDQQLKAGDNPYLRYNHADAEFQERLQEDTSFGGNLGRAVFQAKKRVLEPLGLVEEGAKTAPGKKRPVEPSPQRSPDSSTGIGKKGQQPARKRLNFGQTGDSESVPDPQPLGEPPAAPSGVAPNTMAAGGGAPMADNNEGADGVGNASGNWHCDSTWLGDRVITTSTRTWALPTYNNHLYKQISSASTGASNDNHYFGYSTPWGYFDFNRFHCHFSPRDWQRLITTIGGFRPKRLNFKLFNIQVKEVTDNNGVKTIANNLTSTVQVFTDSEYQLPYVLGSAHQGCLPPFPADVFMIPQYGYLTLNNGSQAVGRSSFYCLEYFPSQMLRTGNNFTFSYTFEDVPFHSSYAHSQSLDRLMNPLIDQYLYYLSRTQTTGGTANTQTLGFSQGGPNTMANQAKNWLPGPCYRQQRVSTTTGQNNNSNFAWTAGTKYHLNGRNSLANPGIAMATHKDDKERFFPSNGILIFGKQNAARDNADYSDVMLTSEEEIKTTNPVATEEYGIVADNLQQQNTAPQIGTVNSQGALPGMVWQNRDVYLQGPIWAKIPHTDGNFHPSPLMGGFGLKHPPPQILIKNTPVPADPPTTFNQSKLNSFITQYSTGQVSVEIEWELQKENSKRWNPEIQYTSNYYKSTSVDFAVNTEGVYSEPHPIGTRYLTRPL

SEQ ID NO: 1120 - protein, 736 aa, synthetic construct
  REGION 1..736: note = source = /note="Description of Artificial Sequence: Synthetic polypeptide"
MAADGYLPDWLEDTLSEGIRQWWKLKPGPPPPKPAERHKDDGRGLVLPGYKYLGPFNGLDKGEPVNAADAAALEHDKAYDQQLKAGDNPYLRYNHADAEFQERLQEDTSFGGNLGRAVFQAKKRVLEPLGLVEEPVKTAPGKKRPVEQSPQEPDSSSGIGKKGQQPAKKRLNFGQTGDSESVPDPQPLGEPPATPAAVGPTTMASGGGAPMADNNEGADGVGNASGNWHCDSTWMGDRVITTSTRTWALPTYNNHLYKQISSASTGASNDNHYFGYSTPWGYFDFNRFHCHFSPRDWQRLINNNWGFRPKRLNFKLFNIQVKEVTQNEGTKTIANNLTSTIQVFTDSEYQLPYVLGSAHQGCLPPFPADVFMIPQYGYLTLNNGSQAVGRSSFYCLEYFPSQMLRTGNNFQFTYTFEDVPFHSSYAHSQSLDRLMNPLIDQYLYYLSRTQTTGGTANTQTLGFSQGGPNTMANHAKNWLPGPCYRQQRVSTTTGQNNNSNFAWTAGTKYHLNGRNSLANPGIAMATHKDDKERFFPSNGILIFGKQNAARDNADYSDVMLTSEEEIKTTNPVATEEYGIVADNLQQQNTAPQIGTVNSQGALPGMVWQNRDVYLQGPIWAKIPHTDGNFHPSPLMGGFGLKHPPPQILIKNTPVPADPPTTFNQSKLNSFITQYSTGQVSVEIEWELQKENSKRWNPEIQYTSNYYKSTSVDFAVNTEGVYSEPHPIGTRYLTRPL

SEQ ID NO: 1121 - protein, 737 aa, synthetic construct
  REGION 1..737: note = source = /note="Description of Artificial Sequence: Synthetic polypeptide"
MAADGYLPDWLEDNLSQGIREWWDLKPGAPKPKANQQKQDDGRGLVLPGYKYLGPFNGLDKGEPVNAADAAALEHDKAYDQQLKAGDNPYLRYNHADAEFQERLQEDTSFGGNLGRAVFQAKKRVLEPLGLVEEGAKTAPGKKRPVEPSPQRSPDSSTGIGKKGQQPARKRLNFGQTGDSESVPDPQPLGEPPAAPAAVGPTTMASGGGAPMADNNEGADGVGSSSGNWHCDSQWLGDRVITTSTRTWALPTYNNHLYKQISSASTGASNDNHYFGYSTPWGYFDFNRFHCHFSPRDWQRLINNNWGFRPKRLSFKLFNIQVKEVTQNEGTKTIANNLTSTIQVFTDSEYQLPYVLGSAHQGCLPPFPADVFMIPQYGYLTLNNGSQAVGRSSFYCLEYFPSQMLRTGNNFQFTYTFEDVPFHSSYAHSQSLDRLMNPLIDQYLYYLSRTQTTGGTTNAQTLGFSQGGPNTMANQAKNWLPGPCYRQQRVSTTTGQNNNSNFAWTAGTKYHLNGRNSLANPGIAMATHKDDKERFFPSNGILIFGKQNAARDNADYSDVMLTSEEEIKTTNPVATEEYGIVADNLQQQNTAPQIGTVNSQGALPGMVWQNRDVYLQGPIWAKIPHTDGNFHPSPLMGGFGLKHPPPQILIKNTPVPADPPTTFNQSKLNSFITQYSTGQVSVEIEWELQKENSKRWNPEIQYTSNYYKSTNVDFAVNTEGVYSEPHPIGTRYLTRPL

SEQ ID NO: 1122 - protein, 736 aa, synthetic construct
  REGION 1..736: note = source = /note="Description of Artificial Sequence: Synthetic polypeptide"
MAADGYLPDWLEDNLSEGIREWWDLKPGAPKPKANQQKQDDGRGLVLPGYKYLGPFNGLDKGEPVNAADAAALEHDKAYDQQLKAGDNPYLRYNHADAEFQERLQEDTSFGGNLGRAVFQAKKRVLEPFGLVEEGAKTAPGKKRPVEQSPQEPDSSSGIGKTGQQPAKKRLNFGQTGDTESVPDPQPIGEPPAAPSGVGPNTMAAGGGAPMADNNEGADGVGSSSGNWHCDSTWMGDRVITTSTRTWALPTYNNHLYKQISSASTGASNDNHYFGYSTPWGYFDFNRFHCHFSPRDWQRLINNNWGFRPKRLNFKLFNIQVKEVTQNEGTKTIANNLTSTIQVFTDSEYQLPYVLGSAHQGCLPPFPADVFMIPQYGYLTLNNGSQAVGRSSFYCLEYFPSQMLRTGNNFQFTYTFEDVPFHSSYAHSQSLDRLMNPLIDQYLYYLSRTQTTGGTANTQTLGFSQGGPNTMANQAKNWLPGPCYRQQRVSTTTGQNNNSNFAWTAGTKYHLNGRNSLANPGIAMATHKDDKERFFPSNGILIFGKQNAARDNADYSDVMLTSEEEIKTTNPVATEEYGIVADNLQQQNTAPQIGTVNSQGALPGMVWQNRDVYLQGPIWAKIPHTDGNFHPSPLMGGFGLKHPPPQILIKNTPVPADPPTTFNQSKLNSFITQYSTGQVSVEIEWELQKENSKRWNPEIQYTSNYYKSTNVDFAVNTEGVYSEPHPIGTRYFTRPL

SEQ ID NO: 1123 - protein, 736 aa, synthetic construct
  REGION 1..736: note = source = /note="Description of Artificial Sequence: Synthetic polypeptide"
MAADGYLPDWLEDNLSEGIREWWDLKPGAPKPKANQQKQDDGRGLVLPGYKYLGPFNGLDKGEPVNAADAAALEHDKAYDQQLKAGDNPYLRYNHADAEFQERLQEDTSFGGNLGRAVFQAKKRVLEPLGLVEEGAKTAPGKKRPVEQSPQEPDSSSGIGKTGQQPAKKRLNFGQTGDSESVPDPQPLGEPPATPAAVGPTTMASGGGAPMADNNEGADGVGNSSGNWHCDSTWMGDRVITTSTRTWALPTYNNHLYKQISSASTGASNDNHYFGYSTPWGYFDFNRFHCHFSPRDWQRLINNNWGFRPKRLNFKLFNIQVKEVTDNNGVKTIANNLTSTVQVFTDSEYQLPYVLGSAHQGCLPPFPADVFMIPQYGYLTLNNGSQAVGRSSFYCLEYFPSQMLRTGNNFQFTYTFEDVPFHSSYAHSQSLDRLMNPLIDQYLYYLSRTQTTGGTANTQTLGFSQGGPNTMANQAKNWLPGPCYRQQRVSTTTGQNNNSNFAWTAGTKYHLNGRNSLANPGIAMATHKDDKERFFPSNGILIFGKQNAARDNADYSDVMLTSEEEIKTTNPVATEEYGIVADNLQQQNTAPQIGTVNSQGALPGMVWQNRDVYLQGPIWAKIPHTDGNFHPSPLMGGFGLKHPPPQILIKNTPVPADPPTTFNQSKLNSFITQYSTGQVSVEIEWELQKENSKRWNPEIQYTSNYYKSTNVDFAVNTEGVYSEPHPIGTRYLTRPL

SEQ ID NO: 1124 - protein, 736 aa, synthetic construct
  REGION 1..736: note = source = /note="Description of Artificial Sequence: Synthetic polypeptide"
MAADGYLPDWLEDNLSEGIREWWDLKPGAPKPKANQQKQDDGRGLVLPGYKYLGPFNGLDKGEPVNAADAAALEHDKAYDQQLKAGDNPYLRYNHADAEFQERLQEDTSFGGNLGRAVFQAKKRVLEPLGLVEEGAKTAPGKKRPVEQSPQEPDSSSGIGKTGQQPAKKRLNFGQTGDSESVPDPQPLGEPPATPAAVGPTTMASGGGAPMADNNEGADGVGNASGNWHCDSTWLGDRVITTSTRTWALPTYNNHLYKQISSASTGASNDNHYFGYSTPWGYFDFNRFHCHFSPRDWQRLINNNWGFRPKRLNFKLFNIQVKEVTQNEGTKTIANNLTSTIQVFTDSEYQLPYVLGSAHQGCLPPFPADVFMIPQYGYLTLNNGSQAVGRSSFYCLEYFPSQMLRTGNNFEFSYQFEDVPFHSSYAHSQSLDRLMNPLIDQYLYYLSRTQTTGGTANTQTLGFSQGGPNTMANQAKNWLPGPCYRQQRVSTTTGQNNNSNFAWTAGTKYHMNGRNSLVNPGIAMATHKDDKERFFPSNGILIFGKQNVARDNADYSDVMLTSEEEIKTTNPVATEEYGIVADNLQQQNTAPQIGTVNSQGALPGMVWQNRDVYLQGPIWAKIPHTDGNFHPSPLMGGFGLKHPPPQILIKNTPVPADPPTTFNQSKLNSFITQYSTGQVSVEIEWELQKENSKRWNPEIQYTSNYYKSTSVDFAVNTEGVYSEPHPIGTRYLTRPL

SEQ ID NO: 1125 - DNA, 2217 bp, synthetic construct
  misc_feature 1..2217: note = source = /note="Description of Artificial Sequence: Synthetic polynucleotide"
  source 1..2217: mol_type = other DNA
atggctgccgatggttatcttccagattggctcgaggacaacctctctgagggcattcgcgagtggtgggcgctgaaacctggagccccgaagcccaaagccaaccagcaaaagcaggacgacggccggggtctggtgcttcctggctacaagtacctcggacccttcaacggactcgacaagggggagcccgtcaacgcggcggacgcagcggccctcgagcacgacaaggcctacgaccagcagctgcaggcgggtgacaatccgtacctgcggtataaccacgccgacgccgagtttcaggagcgtctgcaagaagatacgtcttttgggggcaacctcgggcgagcagtcttccaggccaagaagcgggttctcgaacctctcggtctggttgaggaaggcgctaagacggctcctggaaagaagagaccggtagagccatcaccccagcgttctccagactcctctacgggcatcggcaagaaaggccaacagcccgccagaaaaagactcaattttggtcagactggcgactcagagtcagttccagaccctcaacctctcggagaacctccagcagcgccctctggtgtgggacctaatacaatggctgcaggcggtggcgcaccaatggcagacaataacgaaggcgccgacggagtgggtagttcctcgggaaattggcattgcgattccacatggctgggcgacagagtcatcaccaccagcacccgaacctgggccctgcccacctacaacaaccacctctacaagcaaatctccaacgggacatcgggaggagccaccaacgacaacacctacttcggctacagcaccccctgggggtattttgactttaacagattccactgccacttttcaccacgtgactggcagcgactcatcaacaacaactggggattccggcccaagagactcagcttcaagctcttcaacatccaggtcaaggaggtcacgcagaatgaaggcaccaagaccatcgccaataacctcaccagcaccatccaggtgtttacggactcggagtaccagctgccgtacgttctcggctctgcccaccagggctgcctgcctccgttcccggcggacgtgttcatgattccccagtacggctacctaacactcaacaacggtagtcaggccgtgggacgctcctccttctactgcctggaatactttccttcgcagatgctgagaaccggcaacaacttccagtttacttacaccttcgaggacgtgcctttccacagcagctacgcccacagccagagcttggaccggctgatgaatcctctgattgaccagtacctgtactacttgtctcggactcaaacaacaggaggcacggcaaatacgcagactctgggcttcagccaaggtgggcctaatacaatggccaatcaggcaaagaactggctgccaggaccctgttaccgccaacaacgcgtctcaacgacaaccgggcaaaacaacaatagcaactttgcctggactgctgggaccaaataccatctgaatggaagaaattcattggctaatcctggcatcgctatggcaacacacaaagacgacgaggagcgtttttttcccagtaacgggatcctgatttttggcaaacaaaatgctgccagagacaatgcggattacagcgatgtcatgctcaccagcgaggaagaaatcaaaaccactaaccctgtggctacagaggaatacggtatcgtggcagataacttgcagcagcaaaacacggctcctcaaattggaactgtcaacagccagggggccttacccggtatggtttggcagaaccgggacgtgtacctgcagggtcccatctgggccaagattcctcacacggacggcaacttccacccgtctccgctgatgggcggctttggcctgaaacatcctccgcctcagatcctgatcaagaacacgcctgtacctgcggatcctccgaccaccttcaaccagtcaaagctgaactctttcatcacgcaatacagcaccggacaggtcagcgtggaaattgaatgggagctgcagaaggaaaacagcaagcgctggaaccccgagatccagtacacctccaactactacaaatctacaagtgtggactttgctgttaatacagaaggcgtgtactctgaaccccgccccattggcacccgttacctcacccgtaatctgtaa

SEQ ID NO: 1126 - protein, 738 aa, synthetic construct; identical to SEQ ID NO: 116
  REGION 1..738: note = source = /note="Description of Artificial Sequence: Synthetic polypeptide"

SEQ ID NO: 1127 - protein, 735 aa, synthetic construct
  REGION 1..735: note = source = /note="Description of Artificial Sequence: Synthetic polypeptide"
MAADGYLPDWLEDNLSEGVREWWALQPGAPKPKANQQHQDNARGLVLPGYKYLGPGNGLDKGEPVNAADAAALEHDKAYDQQLKAGDNPYLKYNHADAEFQQRLQGDTSFGGNLGRAVFQAKKRVLEPLGLVEQAGETAPGKKRPLIESPQQPDSSTGIGKKGKQPAKKKLVFEDETGAGDGPPEGSTSGAMSDDSEMRAAAGGAAVEGGQGADGVGNASGDWHCDSTWSEGHVTTTSTRTWVLPTYNNHLYKRLGESLQSNTYNGFSTPWGYFDFNRFHCHFSPRDWQRLINNNWGMRPKAMRVKIFNIQVKEVTTSNGETTVANNLTSTVQIFADSSYELPYVMDAGQEGSLPPFPNDVFMVPQYGYCGLVTGNTSQQQTDRNAFYCLEYFPSQMLRTGNNFEITYSFEKVPFHSMYAHSQSLDRLMNPLIDQYLWGLQSTTTGTTLNAGTATTNFTKLRPTNFSNFKKNWLPGPSIKQQGFSKTANQNYKIPATGSDSLIKYETHSTLDGRWSALTPGPPMATAGPADSKFSNSQLIFAGPKQNGNTATVPGTLIFTSEEELAATNATDTDMWGNLPGGDQSNSNLPTVDRLTALGAVPGMVWQNRDIYYQGPIWAKIPHTDGHFHPSPLIGGFGLKHPPPQIFIKNTPVPANPATTFSSTPVNSFITQYSTGQVSVQIDWEIQKERSKRWNPEVQFTSNYGQQNSLLWAPDAAGKYTEPRAIGTRYLTHHL

SEQ ID NO: 1128 - protein, 735 aa, synthetic construct
  REGION 1..735: note = source = /note="Description of Artificial Sequence: Synthetic polypeptide"
MAADGYLPDWLEDNLSEGVREWWALQPGAPKPKANQQHQDNARGLVLPGYKYLGPGNGLDKGEPVNAADAAALEHDKAYDQQLKAGDNPYLKYNHADAEFQQRLQGDTSFGGNLGRAVFQAKKRVLEPLGLVEQAGETAPGKKRPLIESPQQPDSSTGIGKKGKQPAKKKLVFEDETGAGDGPPEGSTSGAMSDDSEMRAAAGGAAVEGGQGADGVGNASGDWHCDSTWSEGHVTTTSTRTWVLPTYNNHLYKRLGESLQSNTYNGFSTPWGYFDFNRFHCHFSPRDWQRLINNNWGMRPKAMRVKIFNIQVKEVTTSNGETTVANNLTSTVQIFADSSYELPYVMDAGQEGSLPPFPNDVFMVPQYGYCGLVTGNTSQQQTDRNAFYCLEYFPSQMLRTGNNFEITYSFEKVPFHSMYAHSQSLDRLMNPLIDQYLWGLQSTTTGTTLNAGTATTNFTKLRPTNFSNFKKNWLPGPSIKQQGFSKTANQNYLIPATGSDSLIRYETHSTLDGRWSALTPGPPMATAGPADSKFSNSQLIFAGPKQNGNTATVPGTLIFTSEEELAATNATDTDMWGNLPFRDLSSSNLPTVDRSTPLGAVPGMVWQNRDIYYQGPIWAKIPHTDGHFHPSPLIGGFGLKHPPPQIFIKNTPVPANPATTFSSTPVNSFITQYSTGQVSVQIDWEIQKERSKRWNPEVQFTSNYGQQNSLLWAPDAAGKYTEPRAIGTRYLTHHL

SEQ ID NO: 1129 - protein, 735 aa, synthetic construct
  REGION 1..735: note = source = /note="Description of Artificial Sequence: Synthetic polypeptide"
MAADGYLPDWLEDNLSEGVREWWALQPGAPKPKANQQHQDNARGLVLPGYKYLGPGNGLDKGEPVNAADAAALEHDKAYDQQLKAGDNPYLKYNHADAEFQQRLQGDTSFGGNLGRAVFQAKKRVLEPLGLVEQAGETAPGKKRPLIESPQQPDSSTGIGKKGKQPAKKKLVFEDETGAGDGPPEGSTSGAMSDDSEMRAAAGGAAVEGGQGADGVGNASGDWHCDSTWSEGHVTTTSTRTWVLPTYNNHLYKRLGESLQSNTYNGFSTPWGYFDFNRFHCHFSPRDWQRLINNNWGMRPKAMRVKIFNIQVKEVTTSNGETTVANNLTSTVQIFADSSYELPYVMDAGQEGSLPPFPNDVFMVPQYGYCGLVTGNTSQQQTDRNAFYCLEYFPSQMLRTGNNFEITYSFEKVPFHSMYAHSQSLDRLMNPLIDQYLWGLQSTTTGTTLNAGTATTNFTKLRPTNFSNFKKNWLPGPSIKQQGFSKTANQNYYIPATGSDSLILYETHSTLDGRWSALTPGPPMATAGPADSKFSNSQLIFAGPKQNGNTATVPGTLIFTSEEELAATNATDTDMWGNLPGGDQSNSNLPTVDRLTALGAVPGMVWQNRDIYYQGPIWAKIPHTDGHFHPSPLIGGFGLKHPPPQIFIKNTPVPANPATTFSSTPVNSFITQYSTGQVSVQIDWEIQKERSKRWNPEVQFTSNYGQQNSLLWAPDAAGKYTEPRAIGTRYLTHHL

SEQ ID NO: 1130 - protein, 735 aa, synthetic construct
  REGION 1..735: note = source = /note="Description of Artificial Sequence: Synthetic polypeptide"
MAADGYLPDWLEDNLSEGVREWWALQPGAPKPKANQQHQDNARGLVLPGYKYLGPGNGLDKGEPVNAADAAALEHDKAYDQQLKAGDNPYLKYNHADAEFQQRLQGDTSFGGNLGRAVFQAKKRVLEPLGLVEQAGETAPGKKRPLIESPQQPDSSTGIGKKGKQPAKKKLVFEDETGAGDGPPEGSTSGAMSDDSEMRAAAGGAAVEGGQGADGVGNASGDWHCDSTWSEGHVTTTSTRTWVLPTYNNHLYKRLGESLQSNTYNGFSTPWGYFDFNRFHCHFSPRDWQRLINNNWGMRPKAMRVKIFNIQVKEVTTSNGETTVANNLTSTVQIFADSSYELPYVMDAGQEGSLPPFPNDVFMVPQYGYCGLVTGNTSQQQTDRNAFYCLEYFPSQMLRTGNNFEITYSFEKVPFHSMYAHSQSLDRLMNPLIDQYLWGLQSTTTGTTLNAGTATTNFTKLRPTNFSNFKKNWLPGPSIKQQGFSKTANQNYGIPATGSDSLIKYETHSTLDGRWSALTPGPPIATAGPADSKFSNSQLIFAGPKQNGNTATVPGTLIFTSEEELAATNATDTDMWGNLPLYDASSSNLPTVDRLTLLGAVPGMVWQNRDIYYQGPIWAKIPHTDGHFHPSPLIGGFGLKHPPPQIFIKNTPVPANPATTFSSTPVNSFITQYSTGQVSVQIDWEIQKERSKRWNPEVQFTSNYGQQNSLLWAPDAAGKYTEPRAIGTRYLTHHL

SEQ ID NO: 1131 - protein, 735 aa, synthetic construct
  REGION 1..735: note = source = /note="Description of Artificial Sequence: Synthetic polypeptide"
MAADGYLPDWLEDNLSEGVREWWALQPGAPKPKANQQHQDNARGLVLPGYKYLGPGNGLDKGEPVNAADAAALEHDKAYDQQLKAGDNPYLKYNHADAEFQQRLQGDTSFGGNLGRAVFQAKKRVLEPLGLVEQAGETAPGKKRPLIESPQQPDSSTGIGKKGKQPAKKKLVFEDETGAGDGPPEGSTSGAMSDDSEMRAAAGGAAVEGGQGADGVGNASGDWHCDSTWSEGHVTTTSTRTWVLPTYNNHLYKRLGESLQSNTYNGFSTPWGYFDFNRFHCHFSPRDWQRLINNNWGMRPKAMRVKIFNIQVKEVTTSNGETTVANNLTSTVQIFADSSYELPYVMDAGQEGSLPPFPNDVFMVPQYGYCGLVTGNTSQQQTDRNAFYCLEYFPSQMLRTGNNFEITYSFEKVPFHSMYAHSQSLDRLMNPLIDQYLWGLQSTTTGTTLNAGTATTNFTKLRPTNFSNFKKNWLPGPSIKQQGFSKTANQNYTIPATGSDSLITYETHSTLDGRWSALTPGPPGATAGPADSKFSNSQLIFAGPKQNGNTATVPGTLIFTSEEELAATNATDTDMWGNLPRVDTSASNLPTVDRYTNLGAVPGMVWQNRDIYYQGPIWAKIPHTDGHFHPSPLIGGFGLKHPPPQIFIKNTPVPANPATTFSSTPVNSFITQYSTGQVSVQIDWEIQKERSKRWNPEVQFTSNYGQQNSLLWAPDAAGKYTEPRAIGTRYLTHHL

SEQ ID NO: 1132 - protein, 735 aa, synthetic construct
  REGION 1..735: note = source = /note="Description of Artificial Sequence: Synthetic polypeptide"
MAADGYLPDWLEDNLSEGVREWWALQPGAPKPKANQQHQDNARGLVLPGYKYLGPGNGLDKGEPVNAADAAALEHDKAYDQQLKAGDNPYLKYNHADAEFQQRLQGDTSFGGNLGRAVFQAKKRVLEPLGLVEQAGETAPGKKRPLIESPQQPDSSTGIGKKGKQPAKKKLVFEDETGAGDGPPEGSTSGAMSDDSEMRAAAGGAAVEGGQGADGVGNASGDWHCDSTWSEGHVTTTSTRTWVLPTYNNHLYKRLGESLQSNTYNGFSTPWGYFDFNRFHCHFSPRDWQRLINNNWGMRPKAMRVKIFNIQVKEVTTSNGETTVANNLTSTVQIFADSSYELPYVMDAGQEGSLPPFPNDVFMVPQYGYCGLVTGNTSQQQTDRNAFYCLEYFPSQMLRTGNNFEITYSFEKVPFHSMYAHSQSLDRLMNPLIDQYLWGLQSTTTGTTLNAGTATTNFTKLRPTNFSNFKKNWLPGPSIKQQGFSKTANQNYSIPATGSDSLIKYETHSTLDGRWSALTPGPPFATAGPADSKFSNSQLIFAGPKQNGNTATVPGTLIFTSEEELAATNATDTDMWGNLPDYDSSLSNLPTVDRDTTLGAVPGMVWQNRDIYYQGPIWAKIPHTDGHFHPSPLIGGFGLKHPPPQIFIKNTPVPANPATTFSSTPVNSFITQYSTGQVSVQIDWEIQKERSKRWNPEVQFTSNYGQQNSLLWAPDAAGKYTEPRAIGTRYLTHHL

SEQ ID NO: 1133 - protein, 735 aa, synthetic construct
  REGION 1..735: note = source = /note="Description of Artificial Sequence: Synthetic polypeptide"
MAADGYLPDWLEDNLSEGVREWWALQPGAPKPKANQQHQDNARGLVLPGYKYLGPGNGLDKGEPVNAADAAALEHDKAYDQQLKAGDNPYLKYNHADAEFQQRLQGDTSFGGNLGRAVFQAKKRVLEPLGLVEQAGETAPGKKRPLIESPQQPDSSTGIGKKGKQPAKKKLVFEDETGAGDGPPEGSTSGAMSDDSEMRAAAGGAAVEGGQGADGVGNASGDWHCDSTWSEGHVTTTSTRTWVLPTYNNHLYKRLGESLQSNTYNGFSTPWGYFDFNRFHCHFSPRDWQRLINNNWGMRPKAMRVKIFNIQVKEVTTSNGETTVANNLTSTVQIFADSSYELPYVMDAGQEGSLPPFPNDVFMVPQYGYCGLVTGNTSQQQTDRNAFYCLEYFPSQMLRTGNNFEITYSFEKVPFHSMYAHSQSLDRLMNPLIDQYLWGLQSTTTGTTLNAGTATTNFTKLRPTNFSNFKKNWLPGPSIKQQGFSKTANQNYSIPATGSDSLIWYETHSTLDGRWSALTPGPPCATAGPADSKFSNSQLIFAGPKQNGNTATVPGTLIFTSEEELAATNATDTDMWGNLPQGDSSLSNLPTVDRMTVLGAVPGMVWQNRDIYYQGPIWAKIPHTDGHFHPSPLIGGFGLKHPPPQIFIKNTPVPANPATTFSSTPVNSFITQYSTGQVSVQIDWEIQKERSKRWNPEVQFTSNYGQQNSLLWAPDAAGKYTEPRAIGTRYLTHHL

SEQ ID NO: 1134 - protein, 735 aa, synthetic construct
  REGION 1..735: note = source = /note="Description of Artificial Sequence: Synthetic polypeptide"
MAADGYLPDWLEDNLSEGVREWWALQPGAPKPKANQQHQDNARGLVLPGYKYLGPGNGLDKGEPVNAADAAALEHDKAYDQQLKAGDNPYLKYNHADAEFQQRLQGDTSFGGNLGRAVFQAKKRVLEPLGLVEQAGETAPGKKRPLIESPQQPDSSTGIGKKGKQPAKKKLVFEDETGAGDGPPEGSTSGAMSDDSEMRAAAGGAAVEGGQGADGVGNASGDWHCDSTWSEGHVTTTSTRTWVLPTYNNHLYKRLGESLQSNTYNGFSTPWGYFDFNRFHCHFSPRDWQRLINNNWGMRPKAMRVKIFNIQVKEVTTSNGETTVANNLTSTVQIFADSSYELPYVMDAGQEGSLPPFPNDVFMVPQYGYCGLVTGNTSQQQTDRNAFYCLEYFPSQMLRTGNNFEITYSFEKVPFHSMYAHSQSLDRLMNPLIDQYLWGLQSTTTGTTLNAGTATTNFTKLRPTNFSNFKKNWLPGPSIKQQGFSKTANQNYCIPATGSDSLIRYETHSTLDGRWSALTPGPPLATAGPADSKFSNSQLIFAGPKQNGNTATVPGTLIFTSEEELAATNATDTDMWGNLPYKDSSRSNLPTVDRETSLGAVPGMVWQNRDIYYQGPIWAKIPHTDGHFHPSPLIGGFGLKHPPPQIFIKNTPVPANPATTFSSTPVNSFITQYSTGQVSVQIDWEIQKERSKRWNPEVQFTSNYGQQNSLLWAPDAAGKYTEPRAIGTRYLTHHL

SEQ ID NO: 1135 - protein, 735 aa, synthetic construct
  REGION 1..735: note = source = /note="Description of Artificial Sequence: Synthetic polypeptide"
MAADGYLPDWLEDNLSEGVREWWALQPGAPKPKANQQHQDNARGLVLPGYKYLGPGNGLDKGEPVNAADAAALEHDKAYDQQLKAGDNPYLKYNHADAEFQQRLQGDTSFGGNLGRAVFQAKKRVLEPLGLVEQAGETAPGKKRPLIESPQQPDSSTGIGKKGKQPAKKKLVFEDETGAGDGPPEGSTSGAMSDDSEMRAAAGGAAVEGGQGADGVGNASGDWHCDSTWSEGHVTTTSTRTWVLPTYNNHLYKRLGESLQSNTYNGFSTPWGYFDFNRFHCHFSPRDWQRLINNNWGMRPKAMRVKIFNIQVKEVTTSNGETTVANNLTSTVQIFADSSYELPYVMDAGQEGSLPPFPNDVFMVPQYGYCGLVTGNTSQQQTDRNAFYCLEYFPSQMLRTGNNFEITYSFEKVPFHSMYAHSQSLDRLMNPLIDQYLWGLQSTTTGTTLNAGTATTNFTKLRPTNFSNFKKNWLPGPSIKQQGFSKTANQNYIIPATGSDSLIYYETHSTLDGRWSALTPGPPRATAGPADSKFSNSQLIFAGPKQNGNTATVPGTLIFTSEEELAATNATDTDMWGNLPWIDNSRSNLPTVDRPTSLGAVPGMVWQNKNIYYQGPIWAKIPHTDGHFHPSPLIGGFGLKHPPPQIFIKNTPVPANPATTFTSTPVNSFITQYSTGQVSVQIDWEIQKERSKRWNPEVQFTSNYGQQNSLLWAPDAAGKYTEPRAIGTRYLTHHL

SEQ ID NO: 1136 - protein, 735 aa, synthetic construct
  REGION 1..735: note = source = /note="Description of Artificial Sequence: Synthetic polypeptide"
MAADGYLPDWLEDNLSEGVREWWALQPGAPKPKANQQHQDNARGLVLPGYKYLGPGNGLDKGEPVNAADAAALEHDKAYDQQLKAGDNPYLKYNHADAEFQQRLQGDTSFGGNLGRAVFQAKKRVLEPLGLVEQAGETAPGKKRPLIESPQQPDSSTGIGKKGKQPAKKKLVFEDETGAGDGPPEGSTSGAMSDDSEMRAAAGGAAVEGGQGADGVGNASGDWHCDSTWSEGHVTTTSTRTWVLPTYNNHLYKRLGESLQSNTYNGFSTPWGYFDFNRFHCHFSPRDWQRLINNNWGMRPKAMRVKIFNIQVKEVTTSNGETTVANNLTSTVQIFADSSYELPYVMDAGQEGSLPPFPNDVFMVPQYGYCGLVTGNTSQQQTDRNAFYCLEYFPSQMLRTGNNFEITYSFEKVPFHSMYAHSQSLDRLMNPLIDQYLWGLQSTTTGTTLNAGTATTNFTKLRPTNFSNFKKNWLPGPSIKQQGFSKTANQNYGIPATGSDSLIIYETHSTLDGRWSALTPGPPRATAGPADSKFSNSQLIFAGPKQNGNTATVPGTLIFTSEEELAATNATDTDMWGNLPGGDQSNSNLPTVDRLTALGAVPGMVWQNRDIYYQGPIWAKIPHTDGHFHPSPLIGGFGLKHPPPQIFIKNTPVPANPATTFSSTPVNSFITQYSTGQVSVQIDWEIQKERSKRWNPEVQFTSNYGQQNSLLWAPDAAGKYTEPRAIGTRYLTHHL

SEQ ID NO: 1137 - protein, 735 aa, synthetic construct
  REGION 1..735: note = source = /note="Description of Artificial Sequence: Synthetic polypeptide"
MAADGYLPDWLEDNLSEGVREWWALQPGAPKPKANQQHQDNARGLVLPGYKYLGPGNGLDKGEPVNAADAAALEHDKAYDQQLKAGDNPYLKYNHADAEFQQRLQGDTSFGGNLGRAVFQAKKRVLEPLGLVEQAGETAPGKKRPLIESPQQPDSSTGIGKKGKQPAKKKLVFEDETGAGDGPPEGSTSGAMSDDSEMRAAAGGAAVEGGQGADGVGNASGDWHCDSTWSEGHVTTTSTRTWVLPTYNNHLYKRLGESLQSNTYNGFSTPWGYFDFNRFHCHFSPRDWQRLINNNWGMRPKAMRVKIFNIQVKEVTTSNGETTVANNLTSTVQIFADSSYELPYVMDAGQEGSLPPFPNDVFMVPQYGYCGLVTGNTSQQQTDRNAFYCLEYFPSQMLRTGNNFEITYSFEKVPFHSMYAHSQSLDRLMNPLIDQYLWGLQSTTTGTTLNAGTATTNFTKLRPTNFSNFKKNWLPGPSIKQQGFSKTANQNYVIPATESDSLIYYETHSTLDGRWSALTPGPPYATAGPADSKFSNSQLIFAGPKQNGNTATVPGTLIFTSEEELAATNATDTDMWGNLPPRDDSTSNLPTVDRKTYLGAVPGMVWQNRDIYYQGPIWAKIPHTDGHFHPSPLIGGFGLKHPPPQIFIKNTPVPANPATTFSSTPVNSFITQYSTGQVSVQIDWEIQKERSKRWNPEVQFTSNYGQQNSLLWAPDAAGKYTEPRAIGTRYLTHHL

SEQ ID NO: 1138 - protein, 735 aa, synthetic construct
  REGION 1..735: note = source = /note="Description of Artificial Sequence: Synthetic polypeptide"
MAADGYLPDWLEDNLSEGVREWWALQPGAPKPKANQQHQDNARGLVLPGYKYLGPGNGLDKGEPVNAADAAALEHDKAYDQQLKAGDNPYLKYNHADAEFQQRLQGDTSFGGNLGRAVFQAKKRVLEPLGLVEQAGETAPGKKRPLIESPQQPDSSTGIGKKGKQPAKKKLVFEDETGAGDGPPEGSTSGAMSDDSEMRAAAGGAAVEGGQGADGVGNASGDWHCDSTWSEGHVTTTSTRTWVLPTYNNHLYKRLGESLQSNTYNGFSTPWGYFDFNRFHCHFSPRDWQRLINNNWGMRPKAMRVKIFNIQVKEVTTSNGETTVANNLTSTVQIFADSSYELPYVMDAGQEGSLPPFPNDVFMVPQYGYCGLVTGNTSQQQTDRNAFYCLEYFPSQMLRTGNNFEITYSFEKVPFHSMYAHSQSLDRLMNPLIDQYLWGLQSTTTGTTLNAGTATTNFTKLRPTNFSNFKKNWLPGPSIKQQGFSKTANQNYYIPATGSDSLIIYETHSTLDGRWSALTPGPPIATAGPADSKFSNSQLIFAGPKQNGNTATVPGTLIFTSEEELAATNSTDTDMWGNLPTDDDSRSNLPTVDRMTLLGAVPGMVWQNRDIYYQGPIWAKIPHTDGHFHPSPLIGGFGLKHPPPQIFIKNTPVPANPATTFSSTPVNSFITQYSTGQVSVQIDWEIQKERSKRWNPEVQFTSNYGQQNSLLWAPDAAGKYTEPRAIGTRYLTHHL

SEQ ID NO: 1139 - protein, 735 aa, synthetic construct
  REGION 1..735: note = source = /note="Description of Artificial Sequence: Synthetic polypeptide"
MAADGYLPDWLEDNLSEGVREWWALQPGAPKPKANQQHQDNARGLVLPGYKYLGPGNGLDKGEPVNAADAAALEHDKAYDQQLKAGDNPYLKYNHADAEFQQRLQGDTSFGGNLGRAVFQAKKRVLEPLGLVEQAGETAPGKKRPLIESPQQPDSSTGIGKKGKQPAKKKLVFEDETGAGDGPPEGSTSGAMSDDSEMRAAAGGAAVEGGQGADGVGNASGDWHCDSTWSEGHVTTTSTRTWVLPTYNNHLYKRLGESLQSNTYNGFSTPWGYFDFNRFHCHFSPRDWQRLINNNWGMRPKAMRVKIFNIQVKEVTTSNGETTVANNLTSTVQIFADSSYELPYVMDAGQEGSLPPFPNDVFMVPQYGYCGLVTGNTSQQQTDRNAFYCLEYFPSQMLRTGNNFEITYSFEKVPFHSMYAHSQSLDRLMNPLIDQYLWGLQSTTTGTTLNAGTATTNFTKLRPTNFSNFKKNWLPGPSIKQQGFSKTANQNYHIPATGSDSLIYYETHSTLDGRWSALTPGPPSATAGPADSKFSNSQLIFAGPKQNGNTATVPGTLIFTSEEELAATNATDTDMWGNLPRRDSSVSNLPTVDRYTDLGAVPGMVWQNRDIYYQGPIWAKIPHTDGHFHPSPLIGGFGLKHPPPQIFIKNTPVPANPATTFSSTPVNSFITQYSTGQVSVQIDWEIQKERSKRWNPEVQFTSNYGQQNSLLWAPDAAGKYTEPRAIGTRYLTHHL

SEQ ID NO: 1140 - protein, 735 aa, synthetic construct
  REGION 1..735: note = source = /note="Description of Artificial Sequence: Synthetic polypeptide"
MAADGYLPDWLEDNLSEGVREWWALQPGAPKPKANQQHQDNARGLVLPGYKYLGPGNGLDKGEPVNAADAAALEHDKAYDQQLKAGDNPYLKYNHADAEFQQRLQGDTSFGGNLGRAVFQAKKRVLEPLGLVEQAGETAPGKKRPLIESPQQPDSSTGIGKKGKQPAKKKLVFEDETGAGDGPPEGSTSGAMSDDSEMRAAAGGAAVEGGQGADGVGNASGDWHCDSTWSEGHVTTTSTRTWVLPTYNNHLYKRLGESLQSNTYNGFSTPWGYFDFNRFHCHFSPRDWQRLINNNWGMRPKAMRVKIFNIQVKEVTTSNGETTVANNLTSTVQIFADSSYELPYVMDAGQEGSLPPFPNDVFMVPQYGYCGLVTGNTSQQQTDRNAFYCLEYFPSQMLRTGNNFEITYSFEKVPFHSMYAHSQSLDRLMNPLIDQYLWGLQSTTTGTTLNAGTATTNFTKLRPTNFSNFKKNWLPGPSIKQQGFSKTANQNYSIPATGSDSLISYETHSTLDGRWSALTPGPPRATAGPADSKFSNSQLIFAGPKQNGNTATVPGTLIFTSEEELAATNATDTDMWGNLPRHDSSLSNLPTVDRNTGLGAVPGMVWQNRDIYYQGPIWAKIPHTDGHFHPSPLIGGFGLKHPPPQIFIKNTPVPANPATTFSSTPVNSFITQYSTGQVSVQIDWEIQKERSKRWNPEVQFTSNYGQQNSLLWAPDAAGKYTEPRAIGTRYLTHHL

SEQ ID NO: 1141 - protein, 735 aa, synthetic construct
  REGION 1..735: note = source = /note="Description of Artificial Sequence: Synthetic polypeptide"
MAADGYLPDWLEDNLSEGVREWWALQPGAPKPKANQQHQDNARGLVLPGYKYLGPGNGLDKGEPVNAADAAALEHDKAYDQQLKAGDNPYLKYNHADAEFQQRLQGDTSFGGNLGRAVFQAKKRVLEPLGLVEQAGETAPGKKRPLIESPQQPDSSTGIGKKGKQPAKKKLVFEDETGAGDGPPEGSTSGAMSDDSEMRAAAGGAAVEGGQGADGVGNASGDWHCDSTWSEGHVTTTSTRTWVLPTYNNHLYKRLGESLQSNTYNGFSTPWGYFDFNRFHCHFSPRDWQRLINNNWGMRPKAMRVKIFNIQVKEVTTSNGETTVANNLTSTVQIFADSSYELPYVMDAGQEGSLPPFPNDVFMVPQYGYCGLVTGNTSQQQTDRNAFYCLEYFPSQMLRTGNNFEITYSFEKVPFHSMYAHSQSLDRLMNPLIDQYLWGLQSTTTGTTLNAGTATTNFTKLRPTNFSNFKKNWLPGPSIKQQGFSKTANQNYFIPATGSDSLIRYETHSTLDGRWSALTPGPPLATAGPADSKFSNSQLIFAGPKQNGNTATVPGTLIFTSEEELAATNATDTDMWGNLPVIDFSKSNLPTVDRLTHLGAVPGMVWQNRDIYYQGPIWAKIPHTDGHFHPSPLIGGFGLKHPPPQIFIKNTPVPANPATTFSSTPVNSFITQYSTGQVSVQIDWEIQKERSKRWNPEVQFTSNYGQQNSLLWAPDAAGKYTEPRAIGTRYLTHHL

SEQ ID NO: 1142 - protein, 735 aa, synthetic construct
  REGION 1..735: note = source = /note="Description of Artificial Sequence: Synthetic polypeptide"
MAADGYLPDWLEDNLSEGVREWWALQPGAPKPKANQQHQDNARGLVLPGYKYLGPGNGLDKGEPVNAADAAALEHDKAYDQQLKAGDNPYLKYNHADAEFQQRLQGDTSFGGNLGRAVFQAKKRVLEPLGLVEQAGETAPGKKRPLIESPQQPDSSTGIGKKGKQPAKKKLVFEDETGAGDGPPEGSTSGAMSDDSEMRAAAGGAAVEGGQGADGVGNASGDWHCDSTWSEGHVTTTSTRTWVLPTYNNHLYKRLGESLQSNTYNGFSTPWGYFDFNRFHCHFSPRDWQRLINNNWGMRPKAMRVKIFNIQVKEVTTSNGETTVANNLTSTVQIFADSSYELPYVMDAGQEGSLPPFPNDVFMVPQYGYCGLVTGNTSQQQTDRNAFYCLEYFPSQMLRTGNNFEITYSFEKVPFHSMYAHSQSLDRLMNPLIDQYLWGLQSTTTGTTLNAGTATTNFTKLRPTNFSNFKKNWLPGPSIKQQGFSKTANQNYKIPATGSDSLIKYETHSTLDGRWSALTPGPPMATAGPADSKFSNSQLIFAGPKQNGNTATVPGTLIFTSEEELAATNATDTDMWGNLPVRDFSLSNLPTVDRTTKLGAVPGMVWQNRDIYYQGPIWAKIPHTDGHFHPSPLIGGFGLKHPPPQIFIKNTPVPANPATTFSSTPVNSFITQYSTGQVSVQIDWEIQKERSKRWNPEVQFTSNYGQQNSLLWAPDAAGKYTEPRAIGTRYLTHHL

SEQ ID NO: 1143 - protein, 735 aa, synthetic construct
  REGION 1..735: note = source = /note="Description of Artificial Sequence: Synthetic polypeptide"
MAADGYLPDWLEDNLSEGVREWWALQPGAPKPKANQQHQDNARGLVLPGYKYLGPGNGLDKGEPVNAADAAALEHDKAYDQQLKAGDNPYLKYNHADAEFQQRLQGDTSFGGNLGRAVFQAKKRVLEPLGLVEQAGETAPGKKRPLIESPQQPDSSTGIGKKGKQPAKKKLVFEDETGAGDGPPEGSTSGAMSDDSEMRAAAGGAAVEGGQGADGVGNASGDWHCDSTWSEGHVTTTSTRTWVLPTYNNHLYKRLGESLQSNTYNGFSTPWGYFDFNRFHCHFSPRDWQRLINNNWGMRPKAMRVKIFNIQVKEVTTSNGETTVANNLTSTVQIFADSSYELPYVMDAGQEGSLPPFPNDVFMVPQYGYCGLVTGNTSQQQTDRNAFYCLEYFPSQMLRTGNNFEITYSFEKVPFHSMYAHSQSLDRLMNPLIDQYLWGLQSTTTGTTLNAGTATTNFTKLRPTNFSNFKKNWLPGPSIKQQGFSKTANQNYFIPATGSDSLIQYETHSTLDGRWSALTPGPPMATAGPADSKFSNSQLIFAGPKQNGNTATVPGTLIFTSEEELAATNATDTDMWGNLPGGDQSNSNLPTVDRLTALGAVPGMVWQNRDIYYQGPIWAKIPHTDGHFHPSPLIGGFGLKHPPPQIFIKNTPVPANPATTFSSTPVNSFITQYSTGQVSVQIDWEIQKERSKRWNPEVQFTSNYGQQNSLLWAPDAAGKYTEPRAIGTRYLTHHL

SEQ ID NO: 1144 - protein, 735 aa, synthetic construct
  REGION 1..735: note = source = /note="Description of Artificial Sequence: Synthetic polypeptide"
MAADGYLPDWLEDNLSEGVREWWALQPGAPKPKANQQHQDNARGLVLPGYKYLGPGNGLDKGEPVNAADAAALEHDKAYDQQLKAGDNPYLKYNHADAEFQQRLQGDTSFGGNLGRAVFQAKKRVLEPLGLVEQAGETAPGKKRPLIESPQQPDSSTGIGKKGKQPAKKKLVFEDETGAGDGPPEGSTSGAMSDDSEMRAAAGGAAVEGGQGADGVGNASGDWHCDSTWSEGHVTTTSTRTWVLPTYNNHLYKRLGESLQSNTYNGFSTPWGYFDFNRFHCHFSPRDWQRLINNNWGMRPKAMRVKIFNIQVKEVTTSNGETTVANNLTSTVQIFADSSYELPYVMDAGQEGSLPPFPNDVFMVPQYGYCGLVTGNTSQQQTDRNAFYCLEYFPSQMLRTGNNFEITYSFEKVPFHSMYAHSQSLDRLMNPLIDQYLWGLQSTTTGTTLNAGTATTNFTKLRPTNFSNFKKNWLPGPSIKQQGFSKTANQNYEMPATGSDSLIIYETHSTLDGRWSALTPGPPFATAGPADSKFSNSQLIFAGPKQNGNTATVPGTLIFTSEEELAATNATDTDVWGNLPSGDHSQSNLPTVDRPTMLGAVPGMVWQNRDIYYQGPIWAKIPHTDGHFHPSPLIGGFGLKHPPPQIFIKNTPVPANPATTFISTPVNSFITQYSTGQVSVHIDWEIQKERSKRWNPEVQFTSDYGQHSSLLWAPDAAGKYTEPTAIGTRYLTHHL

SEQ ID NO: 1145 - protein, 734 aa, synthetic construct
  REGION 1..734: note = source = /note="Description of Artificial Sequence: Synthetic polypeptide"
MAADGYLPDWLEDNLSEGVREWWALQPGAPKPKANQQHQDNARGLVLPGYKYLGPGNGLDKGEPVNAADAAALEHDKAYDQQLKAGDNPYLKYNHADAEFQQRLQGDTSFGGNLGRAVFQAKKRVLEPLGLVEQAGETAPGKKRPLIESPQQPDSSTGIGKKGKQPAKKKLVFEDETGAGDGPPEGSTSGAMSDDSEMRAAAGGAAVEGGQGADGVGNASGDWHCDSTWSEGHVTTTSTRTWVLPTYNNHLYKRLGESLQSNTYNGFSTPWGYFDFNRFHCHFSPRDWQRLINNNWGMRPKAMRVKIFNIQVKEVTTSNGETTVANNLTSTVQIFADSSYELPYVMDAGQEGSLPPFPNDVFMVPQYGYCGLVTGNTSQQQTDRNAFYCLEYFPSQMLRTGNNFEITYSFEKVPFHSMYAHSQSLDRLMNPLIDQYLWGLQSTTTGTTLNAGTATTNFTKLRPTNFSNFKKNWLPGPSIKQQGFSKTANQNDIPATGSDSLIKYETHSTLDGRWSALTPGPPMATAGPADSKFSNSQLIFAGPKQNGNTATVPGTLIFTSEEELAATNATDTDMWGNLPGGDQSNSNLPTVDRLTALGAVPGMVWQNRDIYYQGPIWAKIPHTDGHFHPSPLIGGFGLKHPPPQIFIKNTPVPANPATTFSSTPVNSFITQYSTGQVSVQIDWEIQKERSKRWNPEVQFTSNYGQQNSLLWAPDAAGKYTEPRAIGTRYLTHHL

SEQ ID NO: 1146 - protein, 735 aa, synthetic construct
  REGION 1..735: note = source = /note="Description of Artificial Sequence: Synthetic polypeptide"
MAADGYLPDWLEDNLSEGVREWWALQPGAPKPKANQQHQDNARGLVLPGYKYLGPGNGLDKGEPVNAADAAALEHDKAYDQQLKAGDNPYLKYNHADAEFQQRLQGDTSFGGNLGRAVFQAKKRVLEPLGLVEQAGETAPGKKRPLIESPQQPDSSTGIGKKGKQPAKKKLVFEDETGAGDGPPEGSTSGAMSDDSEMRAAAGGAAVEGGQGADGVGNASGDWHCDSTWSEGHVTTTSTRTWVLPTYNNHLYKRLGESLQSNTYNGFSTPWGYFDFNRFHCHFSPRDWQRLINNNWGMRPKAMRVKIFNIQVKEVTTSNGETTVANNLTSTVQIFADSSYELPYVMDAGQEGSLPPFPNDVFMVPQYGYCGLVTGNTSQQQTDRNAFYCLEYFPSQMLRTGNNFEITYSFEKVPFHSMYAHSQSLDRLMNPLIDQYLWGLQSTTTGTTLNAGTATTNFTKLRPTNFSNFKKNWLPGPSIKQQGFSKTANQNYIIPATGSDSLITYETHSTLDGRWSALTPGPPVATAGPADSKFSNSQLIFAGPKQNGNTATVPGTLIFTSEEELAATNATDTDMWGNLPFNDDSSSNLPTVDRSTFLGAVPGMVWQNRDIYYQGPIWAKIPHTDGHFHPSPLIGGFGLKHPPPQIFIKNTPVPANPATTFSSTPVNSFITQYSTGQVSVQIDWEIQKERSKRWNPEVQFTSNYGQQNSLLWAPDAAGKYTEPRAIGTRYLTHHL

SEQ ID NO: 1147 - protein, 733 aa, synthetic construct
  REGION 1..733: note = source = /note="Description of Artificial Sequence: Synthetic polypeptide"
MAADGYLPDWLEDNLSEGIREWWDLKPGAPKPKANQQKQDDGRGLVLPGYKYLGPFNGLDKGEPVNAADAAALEHDKAYDQQLKAGDNPYLRYNHADAEFQERLQEDTSFGGNLGRAVFQAKKRVLEPLGLVEEGAKTAPGKKRPLESPQEPDSSSGIGKKGKQPARKRLNFEEDTGAGDGPPEGSDTSAMSSDIEMRAAPGGNAVDAGQGSDGVGNASGDWHCDSTWSEGKVTTTSTRTWVLPTYNNHLYLRLGTTSSSNTYNGFSTPWGYFDFNRFHCHFSPRDWQRLINNNWGLRPKAMRVKIFNIQVKEVTTSNGETTVANNLTSTVQIFADSSYELPYVMDAGQEGSLPPFPNDVFMVPQYGYCGIVTGENQNQTDRNAFYCLEYFPSQMLRTGNNFEMAYNFEKVPFHSMYAHSQSLDRLMNPLLDQYLWHLQSTTSGETLNQGNAATTFGKIRSGDFAFYRKNWLPGPCVKQQRFSKTASQNYKIPASGGNALLKYDTHYTLNNRWSNIAPGPPMATAGPSDGDFSNAQLIFPGPSVTGNTTTSANNLLFTSEEEIAATNPRDTDMFGQIADNNQNATTAPITGNVTAMGVLPGMVWQNRDIYYQGPIWAKIPHADGHFHPSPLIGGFGLKHPPPQIFIKNTPVPANPATTFTAARVDSFITQYSTGQVAVQIEWEIEKERSKRWNPEVQFTSNYGNQSSMLWAPDTTGKYTEPRVIGSRYLTNHL

SEQ ID NO: 1148 - protein, 742 aa, synthetic construct; identical to SEQ ID NO: 959
  REGION 1..742: note = source = /note="Description of Artificial Sequence: Synthetic polypeptide"

SEQ ID NO: 1149 - protein, 733 aa, synthetic construct; identical to SEQ ID NO: 432
  REGION 1..733: note = source = /note="Description of Artificial Sequence: Synthetic polypeptide"

SEQ ID NO: 1150 - protein, 733 aa, synthetic construct; identical to SEQ ID NO: 149
  REGION 1..733: note = source = /note="Description of Artificial Sequence: Synthetic polypeptide"

SEQ ID NO: 1151 - protein, 733 aa, synthetic construct; identical to SEQ ID NO: 436
  REGION 1..733: note = source = /note="Description of Artificial Sequence: Synthetic polypeptide"

SEQ ID NO: 1152 - protein, 735 aa, synthetic construct
  REGION 1..735: note = source = /note="Description of Artificial Sequence: Synthetic polypeptide"
MAADGYLPDWLEDNLSEGVREWWALQPGAPKPKANQQHQDNARGLVLPGYKYLGPGNGLDKGEPVNAADAAALEHDKAYDQQLKAGDNPYLKYNHADAEFQQRLQGDTSFGGNLGRAVFQAKKRVLEPLGLVEQAGETAPGKKRPLIESPQQPDSSTGIGKKGKQPAKKKLVFEDETGAGDGPPEGSTSGAMSDDSEMRAAAGGAAVEGGQGADGVGNASGDWHCDSTWSEGHVTTTSTRTWVLPTYNNHLYKRLGESLQSNTYNGFSTPWGYFDFNRFHCHFSPRDWQRLINNNWGMRPKAMRVKIFNIQVKEVTTSNGETTVANNLTSTVQIFADSSYELPYVMDAGQEGSLPPFPNDVFMVPQYGYCGLVTGNTSQQQTDRNAFYCLEYFPSQMLRTGNNFEITYSFEKVPFHSMYAHSQSLDRLMNPLIDQYLWGLQSTTTGTTLNAGTATTNFTKLRPTNFSNFKKNWLPGPSIKQQGFSKTANQNYEIPATGSDSLIEYETHSTLDGRWSALTPGPPMATAGPADSKFSNSQLIFAGPKQNGNTATVPGTLIFTSEEELAATNATDTDMWGNLPGGDQSSSNLPTVDRLTALGAVPGMVWQNRDIYYQGPIWAKIPHTDGHFHPSPLIGGFGLKHPPPQIFIKNTPVPANPATTFSSTPVNSFITQYSTGQVSVQIDWEIQKERSKRWNPEVQFTSNYGQQNSLLWAPDAAGKYTEPRAIGTRYLTHHL

SEQ ID NO: 1153 - protein, 735 aa, synthetic construct
  REGION 1..735: note = source = /note="Description of Artificial Sequence: Synthetic polypeptide"
MAADGYLPDWLEDNLSEGVREWWALQPGAPKPKANQQHQDNARGLVLPGYKYLGPGNGLDKGEPVNAADAAALEHDKAYDQQLKAGDNPYLKYNHADAEFQQRLQGDTSFGGNLGRAVFQAKKRVLEPLGLVEQAGETAPGKKRPLIESPQQPDSSTGIGKKGKQPAKKKLVFEDETGAGDGPPEGSTSGAMSDDSEMRAAAGGAAVEGGQGADGVGNASGDWHCDSTWSEGHVTTTSTRTWVLPTYNNHLYKRLGESLQSNTYNGFSTPWGYFDFNRFHCHFSPRDWQRLINNNWGMRPKAMRVKIFNIQVKEVTTSNGETTVANNLTSTVQIFADSSYELPYVMDAGQEGSLPPFPNDVFMVPQYGYCGLVTGNTSQQQTDRNAFYCLEYFPSQMLRTGNNFEITYSFEKVPFHSMYAHSQSLDRLMNPLIDQYLWGLQSTTTGTTLNAGTATTNFTKLRPTNFSNFKKNWLPGPSIKQQGFSKTANQNYEIPATGSDSLIEYETHSTLDGRWSALTPGPPMATAGPADSKFSNSQLIFAGPKQNGNTATVPGTLIFTSEEELAATNATDTDMWGNLPGGDQSSSNLPVVRGLRALGAVPGMVWQNRDIYYQGPIWAKIPHTDGHFHPSPLIGGFGLKHPPPQIFIKNTPVPANPATTFSSTPVNSFITQYSTGQVSVQIDWEIQKERSKRWNPEVQFTSNYGQQNSLLWAPDAAGKYTEPRAIGTRYLTHHL

SEQ ID NO: 1154 - protein, 735 aa, synthetic construct
  REGION 1..735: note = source = /note="Description of Artificial Sequence: Synthetic polypeptide"
MAADGYLPDWLEDNLSEGVREWWALQPGAPKPKANQQHQDNARGLVLPGYKYLGPGNGLDKGEPVNAADAAALEHDKAYDQQLKAGDNPYLKYNHADAEFQQRLQGDTSFGGNLGRAVFQAKKRVLEPLGLVEQAGETAPGKKRPLIESPQQPDSSTGIGKKGKQPAKKKLVFEDETGAGDGPPEGSTSGAMSDDSEMRAAAGGAAVEGGQGADGVGNASGDWHCDSTWSEGHVTTTSTRTWVLPTYNNHLYKRLGESLQSNTYNGFSTPWGYFDFNRFHCHFSPRDWQRLINNNWGMRPKAMRVKIFNIQVKEVTTSNGETTVANNLTSTVQIFADSSYELPYVMDAGQEGSLPPFPNDVFMVPQYGYCGLVTGNTSQQQTDRNAFYCLEYFPSQMLRTGNNFEITYSFEKVPFHSMYAHSQSLDRLMNPLIDQYLWGLQSTTTGTTLNAGTATTNFTKLRPTNFSNFKKNWLPGPSIKQQGFSKTANQNYEIPATGSDSLIEYETHSTLDGRWSALTPGPPMATAGPADSKFSNSQLIFAGPKQNGNTATVPGTLIFTSEEELAATNATDTDMWGNLPGGDQSSSNLPVVNRLSALGAVPGMVWQNRDIYYQGPIWAKIPHTDGHFHPSPLIGGFGLKHPPPQIFIKNTPVPANPATTFSSTPVNSFITQYSTGQVSVQIDWEIQKERSKRWNPEVQFTSNYGQQNSLLWAPDAAGKYTEPRAIGTRYLTHHL

SEQ ID NO: 1155 - protein, 735 aa, synthetic construct
  REGION 1..735: note = source = /note="Description of Artificial Sequence: Synthetic polypeptide"
MAADGYLPDWLEDNLSEGVREWWALQPGAPKPKANQQHQDNARGLVLPGYKYLGPGNGLDKGEPVNAADAAALEHDKAYDQQLKAGDNPYLKYNHADAEFQQRLQGDTSFGGNLGRAVFQAKKRVLEPLGLVEQAGETAPGKKRPLIESPQQPDSSTGIGKKGKQPAKKKLVFEDETGAGDGPPEGSTSGAMSDDSEMRAAAGGAAVEGGQGADGVGNASGDWHCDSTWSEGHVTTTSTRTWVLPTYNNHLYKRLGESLQSNTYNGFSTPWGYFDFNRFHCHFSPRDWQRLINNNWGMRPKAMRVKIFNIQVKEVTTSNGETTVANNLTSTVQIFADSSYELPYVMDAGQEGSLPPFPNDVFMVPQYGYCGLVTGNTSQQQTDRNAFYCLEYFPSQMLRTGNNFEITYSFEKVPFHSMYAHSQSLDRLMNPLIDQYLWGLQSTTTGTTLNAGTATTNFTKLRPTNFSNFKKNWLPGPSIKQQGFSKTANQNYEIPATGSDSLIEYETHSTLDGRWSALTPGPPMATAGPADSKFSNSQLIFAGPKQNGNTATVPGTLIFTSEEELAATNATDTDMWGNLPGGDQSSSNLPPVMGLGALGAVPGMVWQNRDIYYQGPIWAKIPHTDGHFHPSPLIGGFGLKHPPPQIFIKNTPVPANPATTFSSTPVNSFITQYSTGQVSVQIDWEIQKERSKRWNPEVQFTSNYGQQNSLLWAPDAAGKYTEPRAIGTRYLTHHL

SEQ ID NO: 1156 - protein, 736 aa, synthetic construct
  REGION 1..736: note = source = /note="Description of Artificial Sequence: Synthetic polypeptide"
MAADGYLPDWLEDNLSEGVREWWALQPGAPKPKANQQHQDNARGLVLPGYKYLGPGNGLDKGEPVNAADAAALEHDKAYDQQLKAGDNPYLKYNHADAEFQQRLQGDTSFGGNLGRAVFQAKKRVLEPLGLVEQAGETAPGKKRPLIESPQQPDSSTGIGKKGKQPAKKKLVFEDETGAGDGPPEGSTSGAMSDDSEMRAAAGGAAVEGGQGADGVGNASGDWHCDSTWSEGHVTTTSTRTWVLPTYNNHLYKRLGESLQSNTYNGFSTPWGYFDFNRFHCHFSPRDWQRLINNNWGMRPKAMRVKIFNIQVKEVTTSNGETTVANNLTSTVQIFADSSYELPYVMDAGQEGSLPPFPNDVFMVPQYGYCGLVTGNTSQQQTDRNAFYCLEYFPSQMLRTGNNFEITYSFEKVPFHSMYAHSQSLDRLMNPLIDQYLWGLQSTTTGTTLNAGTATTNFTKLRPTNFSNFKKNWLPGPSIKQQGFSKTANQNYEIPATGSDSLIEYETHSTLDGRWSALTPGPPMATAGPADSKFSNSQLIFAGPKQNGNTATVPGTLIFTSEEELAATNATDTDMWGNLPGGDQSRVDRLPTVDRLTALGAVPGMVWQNRDIYYQGPIWAKIPHTDGHFHPSPLIGGFGLKHPPPQIFIKNTPVPANPATTFSSTPVNSFITQYSTGQVSVQIDWEIQKERSKRWNPEVQFTSNYGQQNSLLWAPDAAGKYTEPRAIGTRYLTHHL

SEQ ID NO: 1157 - protein, 736 aa, synthetic construct
  REGION 1..736: note = source = /note="Description of Artificial Sequence: Synthetic polypeptide"
MAADGYLPDWLEDNLSEGVREWWALQPGAPKPKANQQHQDNARGLVLPGYKYLGPGNGLDKGEPVNAADAAALEHDKAYDQQLKAGDNPYLKYNHADAEFQQRLQGDTSFGGNLGRAVFQAKKRVLEPLGLVEQAGETAPGKKRPLIESPQQPDSSTGIGKKGKQPAKKKLVFEDETGAGDGPPEGSTSGAMSDDSEMRAAAGGAAVEGGQGADGVGNASGDWHCDSTWSEGHVTTTSTRTWVLPTYNNHLYKRLGESLQSNTYNGFSTPWGYFDFNRFHCHFSPRDWQRLINNNWGMRPKAMRVKIFNIQVKEVTTSNGETTVANNLTSTVQIFADSSYELPYVMDAGQEGSLPPFPNDVFMVPQYGYCGLVTGNTSQQQTDRNAFYCLEYFPSQMLRTGNNFEITYSFEKVPFHSMYAHSQSLDRLMNPLIDQYLWGLQSTTTGTTLNAGTATTNFTKLRPTNFSNFKKNWLPGPSIKQQGFSKTANQNYEIPATGSDSLIEYETHSTLDGRWSALTPGPPMATAGPADSKFSNSQLIFAGPKQNGNTATVPGTLIFTSEEELAATNATDTDMWGNLPGGDQSRALRLPTVDRLTALGAVPGMVWQNRDIYYQGPIWAKIPHTDGHFHPSPLIGGFGLKHPPPQIFIKNTPVPANPATTFSSTPVNSFITQYSTGQVSVQIDWEIQKERSKRWNPEVQFTSNYGQQNSLLWAPDAAGKYTEPRAIGTRYLTHHL

SEQ ID NO: 1158 - DNA, 1172 bp, synthetic construct
  misc_feature 1..1172: note = source = /note="Description of Artificial Sequence: Synthetic polynucleotide"
  source 1..1172: mol_type = other DNA
cttaattaggctgcgcgctcgctcgctcactgaggccgcccgggcaaagcccgggcgtcgggcgacctttggtcgcccggcctcagtgagcgagcgagcgcgcagagagggagtggccaactccatcactaggggttccttgtagttaatgattaacccgccatgctacttatctaccagggtaatggggatcctctagaactatagctagtcgacattgattattgactagttattaatagtaatcaattacggggtcattagttcatagcccatatatggagttccgcgttacataacttacggtaaatggcccgcctggctgaccgcccaacgacccccgcccattgacgtcaataatgacgtatgttcccatagtaacgccaatagggactttccattgacgtcaatgggtggactatttacggtaaactgcccacttggcagtacatcaagtgtatcatatgccaagtacgccccctattgacgtcaatgacggtaaatggcccgcctggcattatgcccagtacatgaccttatgggactttcctacttggcagtacatctacgtattagtcatcgctattaccatgtcgaggccacgttctgcttcactctccccatctcccccccctccccacccccaattttgtatttatttattttttaattattttgtgcagcgatgggggcggggggggggggcgcgcgccaggcggggcggggcggggcgaggggcggggcggggcgaggcggagaggtgcggcggcagccaatcagagcggcgcgctccgaaagtttccttttatggcgaggcggcggcggcggcggccctataaaaagcgaagcgcgcggcgggcgggagcaagctttattgcggtagtttatcacagttaaattgctaacgcagtcagtgcttctgacacaacagtctcgaacttaagctgcagaagttggtcgtgaggcactgggcaggtaagtatcaaggttacaagacaggtttaaggagaccaatagaaactgggcttgtcgagacagagaagactcttgcgtttctgataggcacctattggtcttactgacatccactttgcctttctctccacaggtgtccactcccagttcaattacagctcttaaggctagagtacttaatacgactcsactatagg

SEQ ID NO: 1159 - DNA, 3231 bp, synthetic construct
  misc_feature 1..3231: note = source = /note="Description of Artificial Sequence: Synthetic polynucleotide"
  source 1..3231: mol_type = other DNA
taagaattcacgcgtggtacctctagagtcgacccgggcggcctcgaggacggggtgaactacgcctgaggatccgatctttttccctctgccaaaaattatggggacatcatgaagccccttgagcatctgacttctggctaataaaggaaatttattttcattgcaatagtgtgttggaattttttgtgtctctcactcggaagcaattcgttgatctgaatttcgaccacccataatacccattaccctggtagataagtagcatggcgggttaatcattaactacaaggaacccctagtgatggagttggccactccctctctgcgcgctcgctcgctcactgaggccgggcgaccaaaggtcgcccgacgcccgggctttgcccgggcggcctcagtgagcgagcgagcgcgcagccttaattaacctaattcactggccgtcgttttacaacgtcgtgactgggaaaaccctggcgttacccaacttaatcgccttgcagcacatccccctttcgccagctggcgtaatagcgaagaggcccgcaccgatcgcccttcccaacagttgcgcagcctgaatggcgaatgggacgcgccctgtagcggcgcattaagcgcggcgggtgtggtggttacgcgcagcgtgaccgctacacttgccagcgccctagcgcccgctcctttcgctttcttcccttcctttctcgccacgttcgccggctttccccgtcaagctctaaatcgggggctccctttagggttccgatttagtgctttacggcacctcgaccccaaaaaacttgattagggtgatggttcacgtagtgggccatcgccctgatagacggtttttcgccctttgacgttggagtccacgttctttaatagtggactcttgttccaaactggaacaacactcaaccctatctcggtctattcttttgatttataagggattttgccgatttcggcctattggttaaaaaatgagctgatttaacaaaaatttaacgcgaattttaacaaaatattaacgcttacaatttaggtggcacttttcggggaaatgtgcgcggaacccctatttgtttatttttctaaatacattcaaatatgtatccgctcatgagacaataaccctgataaatgcttcaataatattgaaaaaggaagagtatgagtattcaacatttccgtgtcgcccttattcccttttttgcggcattttgccttcctgtttttgctcacccagaaacgctggtgaaagtaaaagatgctgaagatcagttgggtgcacgagtgggttacatcgaactggatctcaacagcggtaagatccttgagagttttcgccccgaagaacgttttccaatgatgagcacttttaaagttctgctatgtggcgcggtattatcccgtattgacgccgggcaagagcaactcggtcgccgcatacactattctcagaatgacttggttgagtactcaccagtcacagaaaagcatcttacggatggcatgacagtaagagaattatgcagtgctgccataaccatgagtgataacactgcggccaacttacttctgacaacgatcggaggaccgaaggagctaaccgcttttttgcacaacatgggggatcatgtaactcgccttgatcgttgggaaccggagctgaatgaagccataccaaacgacgagcgtgacaccacgatgcctgtagcaatggcaacaacgttgcgcaaactattaactggcgaactacttactctagcttcccggcaacaattaatagactggatggaggcggataaagttgcaggaccacttctgcgctcggcccttccggctggctggtttattgctgataaatctggagccggtgagcgtgggtctcgcggtatcattgcagcactggggccagatggtaagccctcccgtatcgtagttatctacacgacggggagtcaggcaactatggatgaacgaaatagacagatcgctgagataggtgcctcactgattaagcattggtaactgtcagaccaagtttactcatatatactttagattgatttaaaacttcatttttaatttaaaaggatctaggtgaagatcctttttgataatctcatgaccaaaatcccttaacgtgagttttcgttccactgagcgtcagaccccgtagaaaagatcaaaggatcttcttgagatcctttttttctgcgcgtaatctgctgcttgcaaacaaaaaaaccaccgctaccagcggtggtttgtttgccggatcaagagctaccaactctttttccgaaggtaactggcttcagcagagcgcagataccaaatactgttcttctagtgtagccgtagttaggccaccacttcaagaactctgtagcaccgcctacatacctcgctctgctaatcctgttaccagtggctgctgccagtggcgataagtcgtgtcttaccgggttggactcaagacgatagttaccggataaggcgcagcggtcgggctgaacggggggttcgtgcacacagcccagcttggagcgaacgacctacaccgaactgagatacctacagcgtgagctatgagaaagcgccacgcttcccgaagggagaaaggcggacaggtatccggtaagcggcagggtcggaacaggagagcgcacgagggagcttccagggggaaacgcctggtatctttatagtcctgtcgggtttcgccacctctgacttgagcgtcgatttttgtgatgctcgtcaggggggcggagcctatggaaaaacgccagcaacgcggcctttttacggttcctggccttttgctggccttttgctcacatgttctttcctgcgttatcccctgattctgtggataaccgtattaccgcctttgagtgagctgataccgctcgccgcagccgaacgaccgagcgcagcgagtcagtgagcgaggaagcggaagagcgcccaatacgcaaaccgcctctccccgcgcgttggccgattcattaatgcagctggcacgacaggtttcccgactggaaagcgggcagtgagcgcaacgcaattaatgtgagttagctcactcattaggcaccccaggctttacactttatgcttccggctcgtatgttgtgtggaattgtgagcggataacaatttcacacaggaaacagctatgaccatgattacgccagatttaattaaggc

SEQ ID NO: 1160 - protein, 737 aa, synthetic construct
  VARIANT 264: note = MOD_RES - Any amino acid
  VARIANT 266: note = MOD_RES - Any amino acid
  VARIANT 268: note = MOD_RES - Any amino acid
  VARIANT 448: note = MOD_RES - Any amino acid
  VARIANT 459..460: note = MOD_RES - Any amino acid
  VARIANT 467: note = MOD_RES - Any amino acid
  VARIANT 470..471: note = MOD_RES - Any amino acid
  VARIANT 474: note = MOD_RES - Any amino acid
  VARIANT 495: note = MOD_RES - Any amino acid
  VARIANT 516: note = MOD_RES - Any amino acid
  VARIANT 533: note = MOD_RES - Any amino acid
  VARIANT 547: note = MOD_RES - Any amino acid
  VARIANT 551: note = MOD_RES - Any amino acid
  VARIANT 555: note = MOD_RES - Any amino acid
  VARIANT 557: note = MOD_RES - Any amino acid
  VARIANT 561: note = MOD_RES - Any amino acid
  VARIANT 563: note = MOD_RES - Any amino acid
  VARIANT 577: note = MOD_RES - Any amino acid
  VARIANT 583: note = MOD_RES - Any amino acid
  VARIANT 593: note = MOD_RES - Any amino acid
  VARIANT 596: note = MOD_RES - Any amino acid
  VARIANT 661..662: note = MOD_RES - Any amino acid
  VARIANT 664..665: note = MOD_RES - Any amino acid
  VARIANT 710: note = MOD_RES - Any amino acid
  VARIANT 717..719: note = MOD_RES - Any amino acid
  VARIANT 723: note = MOD_RES - Any amino acid
  REGION 1..737: note = source = /note="Description of Artificial Sequence: Synthetic polypeptide"
MAADGYLPDWLEDNLSEGIREWWDLKPGAPKPKANQQKQDDGRGLVLPGYKYLGPFNGLDKGEPVNAADAAALEHDKAYDQQLKAGDNPYLRYNHADAEFQERLQEDTSFGGNLGRAVFQAKKRVLEPLGLVEEGAKTAPGKKRPVEPSPQRSPDSSTGIGKKGQQPAKKRLNFGQTGDSESVPDPQPLGEPPAGPSGLGSGTMAAGGGAPMADNNEGADGVGNASGNWHCDSTWLGDRVITTSTRTWALPTYNNHLYKQISSXSXGXTNDNHYFGYSTPWGYFDFNRFHCHFSPRDWQRLINNNWGFRPKRLNFKLFNIQVKEVTTNDGVTTIANNLTSTVQVFSDSEYQLPYVLGSAHQGCLPPFPADVFMIPQYGYLTLNNGSQAVGRSSFYCLEYFPSQMLRTGNNFTFSYTFEDVPFHSSYAHSQSLDRLMNPLIDQYLYYLXRTQSTGGTAGXXELLFSQXGPXXMSXQAKNWLPGPCYRQQRVSKTLXQNNNSNFAWTGATKYHLNGRXSLVNPGVAMATHKDDEXRFFPSSGVLIFGKXGAGXNNTXLXNVMXTXEEEIKTTNPVATEXYGVVAXNLQSSNTAPXTGXVNSQGALPGMVWQNRDVYLQGPIWAKIPHTDGNFHPSPLMGGFGLKHPPPQILIKNTPVPANPPXXFXXAKFASFITQYSTGQVSVEIEWELQKENSKRWNPEIQYTSNYAKSXNVDFAVXXXGVYXEPRPIGTRYLTRNL

SEQ ID NO: 1161 - protein, 737 aa, synthetic construct
  REGION 1..737: note = source = /note="Description of Artificial Sequence: Synthetic polypeptide"
MAADGYLPDWLEDNLSEGIREWWDLKPGAPKPKANQQKQDDGRGLVLPGYKYLGPFNGLDKGEPVNAADAAALEHDKAYDQQLKAGDNPYLRYNHADAEFQERLQEDTSFGGNLGRAVFQAKKRVLEPLGLVEEGAKTAPGKKRPVEPSPQRSPDSSTGIGKKGQQPAKKRLNFGQTGDSESVPDPQPLGEPPAGPSGLGSGTMAAGGGAPMADNNEGADGVGNASGNWHCDSTWLGDRVITTSTRTWALPTYNNHLYKQISSASSGSTNDNHYFGYSTPWGYFDFNRFHCHFSPRDWQRLINNNWGFRPKRLNFKLFNIQVKEVTTNDGVTTIANNLTSTVQVFSDSEYQLPYVLGSAHQGCLPPFPADVFMIPQYGYLTLNNGSQAVGRSSFYCLEYFPSQMLRTGNNFTFSYTFEDVPFHSSYAHSQSLDRLMNPLIDQYLYYLARTQSTGGTAGNRELLFSQGGPSNMSAQAKNWLPGPCYRQQRVSKTLAQNNNSNFAWTGATKYHLNGRDSLVNPGVAMATHKDDEDRFFPSSGVLIFGKEGAGANNTALENVMLTNEEEIKTTNPVATEQYGVVASNLQSSNTAPATGAVNSQGALPGMVWQNRDVYLQGPIWAKIPHTDGNFHPSPLMGGFGLKHPPPQILIKNTPVPANPPATFTPAKFASFITQYSTGQVSVEIEWELQKENSKRWNPEIQYTSNYAKSTNVDFAVNNEGVYSEPRPIGTRYLTRNL

SEQ ID NO: 1162 - protein, 737 aa, synthetic construct
  REGION 1..737: note = source = /note="Description of Artificial Sequence: Synthetic polypeptide"
MAADGYLPDWLEDNLSEGIREWWDLKPGAPKPKANQQKQDDGRGLVLPGYKYLGPFNGLDKGEPVNAADAAALEHDKAYDQQLKAGDNPYLRYNHADAEFQERLQEDTSFGGNLGRAVFQAKKRVLEPLGLVEEGAKTAPGKKRPVEPSPQRSPDSSTGIGKKGQQPAKKRLNFGQTGDSESVPDPQPLGEPPAGPSGLGSGTMAAGGGAPMADNNEGADGVGNASGNWHCDSTWLGDRVITTSTRTWALPTYNNHLYKQISSQSSGSTNDNHYFGYSTPWGYFDFNRFHCHFSPRDWQRLINNNWGFRPKRLNFKLFNIQVKEVTTNDGVTTIANNLTSTVQVFSDSEYQLPYVLGSAHQGCLPPFPADVFMIPQYGYLTLNNGSQAVGRSSFYCLEYFPSQMLRTGNNFTFSYTFEDVPFHSSYAHSQSLDRLMNPLIDQYLYYLSRTQSTGGTAGNRELLFSQGGPANMSAQAKNWLPGPCYRQQRVSKTLSQNNNSNFAWTGATKYHLNGRDSLVNPGVAMATHKDDEERFFPSSGVLIFGKQGAGANNTTLDNVMMTSEEEIKTTNPVATEQYGVVASNLQSSNTAPQTGTVNSQGALPGMVWQNRDVYLQGPIWAKIPHTDGNFHPSPLMGGFGLKHPPPQILIKNTPVPANPPAVFSPAKFASFITQYSTGQVSVEIEWELQKENSKRWNPEIQYTSNYAKSTNVDFAVNSEGVYSEPRPIGTRYLTRNL

SEQ ID NO: 1163 - protein, 737 aa, synthetic construct
  REGION 1..737: note = source = /note="Description of Artificial Sequence: Synthetic polypeptide"
MAADGYLPDWLEDNLSEGIREWWDLKPGAPKPKANQQKQDDGRGLVLPGYKYLGPFNGLDKGEPVNAADAAALEHDKAYDQQLKAGDNPYLRYNHADAEFQERLQEDTSFGGNLGRAVFQAKKRVLEPLGLVEEGAKTAPGKKRPVEPSPQRSPDSSTGIGKKGQQPAKKRLNFGQTGDSESVPDPQPLGEPPAGPSGLGSGTMAAGGGAPMADNNEGADGVGNASGNWHCDSTWLGDRVITTSTRTWALPTYNNHLYKQISSASSGSTNDNHYFGYSTPWGYFDFNRFHCHFSPRDWQRLINNNWGFRPKRLNFKLFNIQVKEVTTNDGVTTIANNLTSTVQVFSDSEYQLPYVLGSAHQGCLPPFPADVFMIPQYGYLTLNNGSQAVGRSSFYCLEYFPSQMLRTGNNFTFSYTFEDVPFHSSYAHSQSLDRLMNPLIDQYLYYLARTQSTGGTAGTRELLFSQGGPSNMSAQAKNWLPGPCYRQQRVSKTLTQNNNSNFAWTGATKYHLNGRDSLVNPGVAMATHKDDEDRFFPSSGVLIFGKQGAGANNTALDNVMITNEEEIKTTNPVATEQYGVVASNLQSSNTAPATGTVNSQGALPGMVWQNRDVYLQGPIWAKIPHTDGNFHPSPLMGGFGLKHPPPQILIKNTPVPANPPTVFSPAKFASFITQYSTGQVSVEIEWELQKENSKRWNPEIQYTSNYAKSTNVDFAVNSEGVYTEPRPIGTRYLTRNL

SEQ ID NO: 1164 - protein, 737 aa, synthetic construct
  VARIANT 264: note = MOD_RES - Any amino acid
  VARIANT 448: note = MOD_RES - Any amino acid
  VARIANT 459: note = MOD_RES - Any amino acid
  VARIANT 470: note = MOD_RES - Any amino acid
  VARIANT 495: note = MOD_RES - Any amino acid
  VARIANT 533: note = MOD_RES - Any amino acid
  VARIANT 547: note = MOD_RES - Any amino acid
  VARIANT 555: note = MOD_RES - Any amino acid
  VARIANT 557: note = MOD_RES - Any amino acid
  VARIANT 561: note = MOD_RES - Any amino acid
  VARIANT 563: note = MOD_RES - Any amino acid
  VARIANT 593: note = MOD_RES - Any amino acid
  VARIANT 596: note = MOD_RES - Any amino acid
  VARIANT 661..662: note = MOD_RES - Any amino acid
  VARIANT 664: note = MOD_RES - Any amino acid
  VARIANT 718: note = MOD_RES - Any amino acid
  VARIANT 723: note = MOD_RES - Any amino acid
  REGION 1..737: note = source = /note="Description of Artificial Sequence: Synthetic polypeptide"
MAADGYLPDWLEDNLSEGIREWWDLKPGAPKPKANQQKQDDGRGLVLPGYKYLGPFNGLDKGEPVNAADAAALEHDKAYDQQLKAGDNPYLRYNHADAEFQERLQEDTSFGGNLGRAVFQAKKRVLEPLGLVEEGAKTAPGKKRPVEPSPQRSPDSSTGIGKKGQQPAKKRLNFGQTGDSESVPDPQPLGEPPAGPSGLGSGTMAAGGGAPMADNNEGADGVGNASGNWHCDSTWLGDRVITTSTRTWALPTYNNHLYKQISSXSSGSTNDNHYFGYSTPWGYFDFNRFHCHFSPRDWQRLINNNWGFRPKRLNFKLFNIQVKEVTTNDGVTTIANNLTSTVQVFSDSEYQLPYVLGSAHQGCLPPFPADVFMIPQYGYLTLNNGSQAVGRSSFYCLEYFPSQMLRTGNNFTFSYTFEDVPFHSSYAHSQSLDRLMNPLIDQYLYYLXRTQSTGGTAGXRELLFSQGGPXNMSAQAKNWLPGPCYRQQRVSKTLXQNNNSNFAWTGATKYHLNGRDSLVNPGVAMATHKDDEXRFFPSSGVLIFGKXGAGANNTXLXNVMXTXEEEIKTTNPVATEQYGVVASNLQSSNTAPXTGXVNSQGALPGMVWQNRDVYLQGPIWAKIPHTDGNFHPSPLMGGFGLKHPPPQILIKNTPVPANPPXXFXPAKFASFITQYSTGQVSVEIEWELQKENSKRWNPEIQYTSNYAKSTNVDFAVNXEGVYXEPRPIGTRYLTRNL

SEQ ID NO: 1165 - protein, 737 aa, synthetic construct
  VARIANT 264: note = MOD_RES - Any amino acid
  VARIANT 448: note = MOD_RES - Any amino acid
  VARIANT 470: note = MOD_RES - Any amino acid
  VARIANT 533: note = MOD_RES - Any amino acid
  VARIANT 547: note = MOD_RES - Any amino acid
  VARIANT 555: note = MOD_RES - Any amino acid
  VARIANT 557: note = MOD_RES - Any amino acid
  VARIANT 561: note = MOD_RES - Any amino acid
  VARIANT 563: note = MOD_RES - Any amino acid
  VARIANT 593: note = MOD_RES - Any amino acid
  VARIANT 596: note = MOD_RES - Any amino acid
  VARIANT 662: note = MOD_RES - Any amino acid
  VARIANT 664: note = MOD_RES - Any amino acid
  VARIANT 718: note = MOD_RES - Any amino acid
  REGION 1..737: note = source = /note="Description of Artificial Sequence: Synthetic polypeptide"
MAADGYLPDWLEDNLSEGIREWWDLKPGAPKPKANQQKQDDGRGLVLPGYKYLGPFNGLDKGEPVNAADAAALEHDKAYDQQLKAGDNPYLRYNHADAEFQERLQEDTSFGGNLGRAVFQAKKRVLEPLGLVEEGAKTAPGKKRPVEPSPQRSPDSSTGIGKKGQQPAKKRLNFGQTGDSESVPDPQPLGEPPAGPSGLGSGTMAAGGGAPMADNNEGADGVGNASGNWHCDSTWLGDRVITTSTRTWALPTYNNHLYKQISSXSSGSTNDNHYFGYSTPWGYFDFNRFHCHFSPRDWQRLINNNWGFRPKRLNFKLFNIQVKEVTTNDGVTTIANNLTSTVQVFSDSEYQLPYVLGSAHQGCLPPFPADVFMIPQYGYLTLNNGSQAVGRSSFYCLEYFPSQMLRTGNNFTFSYTFEDVPFHSSYAHSQSLDRLMNPLIDQYLYYLXRTQSTGGTAGNRELLFSQGGPXNMSAQAKNWLPGPCYRQQRVSKTLSQNNNSNFAWTGATKYHLNGRDSLVNPGVAMATHKDDEXRFFPSSGVLIFGKXGAGANNTXLXNVMXTXEEEIKTTNPVATEQYGVVASNLQSSNTAPXTGXVNSQGALPGMVWQNRDVYLQGPIWAKIPHTDGNFHPSPLMGGFGLKHPPPQILIKNTPVPANPPAXFXPAKFASFITQYSTGQVSVEIEWELQKENSKRWNPEIQYTSNYAKSTNVDFAVNXEGVYSEPRPIGTRYLTRNL

SEQ ID NO: 1166 - DNA, 2217 bp, synthetic construct
  misc_feature 1..2217: note = source = /note="Description of Artificial Sequence: Synthetic polynucleotide"
  source 1..2217: mol_type = other DNA
atggctgccgatggttatcttccagattggctcgaggacactctctctgaaggaataagacagtggtggaagctcaaacctggcccaccaccaccaaagcccgcagagcggcataaggacgacagcaggggtcttgtgcttcctgggtacaagtacctcggacccttcaacggactcgacaagggagagccggtcaacgaggcagacgccgcggccctcgagcacgacaaagcctacgaccggcagctcgacagcggagacaacccgtacctcaagtacaaccacgccgacgcggagtttcaggagcgccttaaagaagatacgtcttttgggggcaacctcggacgagcagtcttccaggcgaaaaagagggttcttgaacctctgggcctggttgaggaacctgttaagacggctccgggaaagaagagaccggtagagccatcaccccagcgttctccagactcctctacgggcatcggcaagaaaggccaacagcccgccagaaaaagactcaattttggtcagactggcgactcagagtcagttccagaccctcaacctctcggagaacctccagcagcgccctctggtgtgggacctaatacaatggctgcaggcggtggcgcaccaatggcagacaataacgaaggcgccgacggagtgggtagttcctcgggaaattggcattgcgattccacatggctgggcgacagagtcatcaccaccagcacccgaacctgggccctgcccacctacaacaaccacctctacaagcaaatctccaacgggacatcgggaggagccaccaacgacaacacctacttcggctacagcaccccctgggggtattttgactttaacagattccactgccacttttcaccacgtgactggcagcgactcatcaacaacaactggggattccggcccaagagactcagcttcaagctcttcaacatccaggtcaaggaggtcacgcagaatgaaggcaccaagaccatcgccaataacctcaccagcaccatccaggtgtttacggactcggagtaccagctgccgtacgttctcggctctgcccaccagggctgcctgcctccgttcccggcggacgtgttcatgattccccagtacggctacctaacactcaacaacggtagtcaggccgtgggacgctcctccttctactgcctggaatactttccttcgcagatgctgagaaccggcaacaacttccagtttacttacaccttcgaggacgtgcctttccacagcagctacgcccacagccagagcttggaccggctgatgaatcctctgattgaccagtacctgtactacttgtctcggactcaaacaacaggaggcacggcaaatacgcagactctgggcttcagccaaggtgggcctaatacaatggccaatcaggcaaagaactggctgccaggaccctgttaccgccaacaacgcgtctcaacgacaaccgggcaaaacaacaatagcaactttgcctggactgctgggaccaaataccatctgaatggaagaaattcattggctaatcctggcatcgctatggcaacacacaaagacgacgaggagcgtttttttcccagtaacgggatcctgatttttggcaaacaaaatgctgccagagacaatgcggattacagcgatgtcatgctcaccagcgaggaagaaatcaaaaccactaaccctgtggctacagaggaatacggtatcgtggcagataacttgcagcagcaaaacacggctcctcaaattggaactgtcaacagccagggggccttacccggtatggtctggcagaaccgggacgtgtacctgcagggtcccatctgggccaagattcctcacacggacggcaacttccacccgtctccgctgatgggcggctttggcctgaaacatcctccgcctcagatcctgatcaagaacacgcctgtacctgcggatcctccgaccaccttcaaccagtcaaagctgaactctttcatcacgcaatacagcaccggacaggtcagcgtggaaattgaatgggagctgcagaaggaaaacagcaagcgctggaaccccgagatccagtacacctccaactactacaaatctacaagtgtggactttgctgttaatacagaaggcgtgtactctgaaccccgccccattggcacccgttacctcacccgtaatctgtaa

SEQ ID NO: 1167 - protein, 733 aa, synthetic construct; identical to SEQ ID NO: 952
  REGION 1..733: note = source = /note="Description of Artificial Sequence: Synthetic polypeptide"

SEQ ID NO: 1168 - DNA, 2203 bp, synthetic construct
  misc_feature 1..2203: note = source = /note="Description of Artificial Sequence: Synthetic polynucleotide"
  source 1..2203: mol_type = other DNA
atgtcttttgttgatcaccctccagattggttggaagaagttggtgaaggtcttcgcgagtttttgggccttgaagcgggcccaccgaaaccaaaacccaatcagcagcatcaagatcaagcccgtggtcttgtgctgcctggttataactatctcggacccggaaacggtctcgatcgaggagagcctgtcaacagggcagacgaggtcgcgcgagagcacgacatctcgtacaacgagcagcttgaggcgggagacaacccctacctcaagtacaaccacgcggacgccgagtttcaggagaagctcgccgacgacacatccttcgggggaaacctcggaaaggcagtctttcaggccaagaaaagggttctcgaaccttttggcctggttgaagagggtgctaagacggcccctaccggaaagcggatagacgaccactttccaaaaagaaagaaggctcggaccgaagaggactccaagccttccacctcgtcagacgccgaagctggacccagcggatcccagcagctgcaaatcccagcccaaccagcctcaagtttgggagctgatacaatgtctgcgggaggtggcggcccattgggcgacaataaccaaggtgccgatggagtgggcaatgcctcgggagattggcattgcgattccacgtggatgggggacagagtcgtcaccaagtccacccgaacctgggtgctgcccagctacaacaaccaccagtaccgagagatcaaaagcggctccgtcgacggaagcaacgccaacgcctactttggatacagcaccccctgggggtactttgactttaaccgcttccacagccactggagcccccgagactggcaaagactcatcaacaactactggggcttcagaccccggtccctcagagtcaaaatcttcaacattcaagtcaaagaggtcacggtgcaggactccaccaccaccatcgccaacaacctcacctccaccgtccaagtgtttacggacgacgactaccagctgccctacgtcgtcggcaacgggaccgagggatgcctgccggccttccctccgcaggtctttacgctgccgcagtacggttacgcgacgctgaaccgcgacaacacagaaaatcccaccgagaggagcagcttcttctgcctagagtactttcccagcaagatgctgagaacgggcaacaactttgagtttacctacaactttgaggaggtgcccttccactccagcttcgctcccagtcagaacctgttcaagctggccaacccgctggtggaccagtacttgtaccgcttcgtgagcacaaataacactggcggagtccagttcaacaagaacctggccgggagatacgccaacacctacaaaaactggttcccggggcccatgggccgaacccagggctggaacctgggctccggggtcaaccgcgccagtgtcagcgccttcgccacgaccaataggatggagctcgagggcgcgagttaccaggtgcccccgcagccgaacggcatgaccaacaacctccagggcagcaacacctatgccctggagaacactatgatcttcaacagccagccggcgaacccgggcaccaccgccacgtacctcgagggcaacatgctcatcaccagcgagagcgagacgcagccggtgaaccgcgtggcgtacaacgtcggcgggcaggtggccaccaacaaccagagctccaccactgcccccgcgaccggcacgtacaacctccaggaaatcgtgcccggcagcgtgtggatggagagggacgtgtacctccaaggacccatctgggccaagatcccagagacgggggcgcactttcacccctctccggccatgggcggattcggactcaaacacccaccgcccatgatgctcatcaagaacacgcctgtgcccggaaatatcaccagcttctcggacgtgcccgtcagcagcttcatcacccagtacagcaccgggcaggtcaccgtggagatggagtgggagctcaagaaggaaaactccaagaggtggaacccagagatccagtacacaaacaactacaacgacccccagtttgtggactttgccccggacagcaccggggaatacagaaccaccagacctatcggaacccgataccttacccgacccctttaacccattcatgtcgcataccctcaataaa

SEQ ID NO: 1169 - protein, 724 aa, synthetic construct
  REGION 1..724: note = source = /note="Description of Artificial Sequence: Synthetic polypeptide"
MSFVDHPPDWLEEVGEGLREFLGLEAGPPKPKPNQQHQDQARGLVLPGYNYLGPGNGLDRGEPVNRADEVAREHDISYNEQLEAGDNPYLKYNHADAEFQEKLADDTSFGGNLGKAVFQAKKRVLEPFGLVEEGAKTAPTGKRIDDHFPKRKKARTEEDSKPSTSSDAEAGPSGSQQLQIPAQPASSLGADTMSAGGGGPLGDNNQGADGVGNASGDWHCDSTWMGDRVVTKSTRTWVLPSYNNHQYREIKSGSVDGSNANAYFGYSTPWGYFDFNRFHSHWSPRDWQRLINNYWGFRPRSLRVKIFNIQVKEVTVQDSTTTIANNLTSTVQVFTDDDYQLPYVVGNGTEGCLPAFPPQVFTLPQYGYATLNRDNTENPTERSSFFCLEYFPSKMLRTGNNFEFTYNFEEVPFHSSFAPSQNLFKLANPLVDQYLYRFVSTNNTGGVQFNKNLAGRYANTYKNWFPGPMGRTQGWNLGSGVNRASVSAFATTNRMELEGASYQVPPQPNGMTNNLQGSNTYALENTMIFNSQPANPGTTATYLEGNMLITSESETQPVNRVAYNVGGQVATNNQSSTTAPATGTYNLQEIVPGSVWMERDVYLQGPIWAKIPETGAHFHPSPAMGGFGLKHPPPMMLIKNTPVPGNITSFSDVPVSSFITQYSTGQVTVEMEWELKKENSKRWNPEIQYTNNYNDPQFVDFAPDSTGEYRTTRPIGTRYLTRPL

SEQ ID NO: 1170 - DNA, 2203 bp, synthetic construct
  misc_feature 1..2203: note = source = /note="Description of Artificial Sequence: Synthetic polynucleotide"
  source 1..2203: mol_type = other DNA
atgtcttttgttgatcaccctccagattggttggaagaagttggtgaaggtcttcgcgagtttttgggccttgaagcgggcccaccgaaaccaaaacccaatcagcagcatcaagatcaagcccgtggtcttgtgctgcctggttataactatctcggacccggaaacggtctcgatcgaggagagcctgtcaacagggcagacgaggtcgcgcgagagcacgacatctcgtacaacgagcagcttgaggcgggagacaacccctacctcaagtacaaccacgcggacgccgagtttcaggagaagctcgccgacgacacatccttcgggggaaacctcggaaaggcagtctttcaggccaagaaaagggttctcgaaccttttggcctggttgaagagggtgctaagacggcccctaccggaaagcggatagacgaccactttccaaaaagaaagaaggctcggaccgaagaggactccaagccttccacctcgtcagacgccgaagctggacccagcggatcccagcagctgcaaatcccagcccaaccagcctcaagtttgggagctgatacaatgtctgcgggaggtggcggcccattgggcgacaataaccaaggtgccgatggagtgggcaatgcctcgggagattggcattgcgattccacgtggatgggggacagagtcgtcaccaagtccacccgaacctgggtgctgcccagctacaacaaccaccagtaccgagagatcaaaagcggctccgtcgacggaagcaacgccaacgcctactttggatacagcaccccctgggggtactttgactttaaccgcttccacagccactggagcccccgagactggcaaagactcatcaacaactactggggcttcagaccccggtccctcagagtcaaaatcttcaacattcaagtcaaagaggtcacggtgcaggactccaccaccaccatcgccaacaacctcacctccaccgtccaagtgtttacggacgacgactaccagctgccctacgtcgtcggcaacgggaccgagggatgcctgccggccttccctccgcaggtctttacgctgccgcagtacggttacgcgacgctgaaccgcgacaacacagaaaatcccaccgagaggagcagcttcttctgcctagagtactttcccagcaagatgctgagaacgggcaacaactttgagtttacctacaactttgaggaggtgcccttccactccagcttcgctcccagtcagaacctgttcaagctggccaacccgctggtggaccagtacttgtaccgcttcgtgagcacaaataacactggcggagtccagttcaacaagaacctggccgggagatacgccaacacctacaaaaactggttcccggggcccatgggccgaacccagggctggaacctgggctccggggtcaaccgcgccagtgtcagcgccttcgccacgaccaataggatggagctcgagggcgcgagttaccaggtgcccccgcagccgaacggcatgaccaacaacctccagggcagcaacacctatgccctggagaacactatgatcttcaacagccagccggcgaacccgggcaccaccgccacgtacctcgagggcaacatgctcatcaccagcgagagcgagacgcagccggtgaaccgcgtggcgtacaacgtcggcgggcagatggccaccaacaaccagagctccaccactgcccccgcgaccggcacggtcaacctccaggaaatcgtgcccggcagcgtgtggatggagagggacgtgtacctccaaggacccatctgggccaagatcccagagacgggggcgcactttcacccctctccggccatgggcggattcggactcaaacacccaccgcccatgatgctcatcaagaacacgcctgtgcccggaaatatcaccagcttctcggacgtgcccgtcagcagcttcatcacccagtacagcaccgggcaggtcaccgtggagatggagtgggagctcaagaaggaaaactccaagaggtggaacccagagatccagtacacaaacaactacaacgacccccagtttgtggactttgccccggacagcaccggggaatacagaaccaccagacctatcggaacccgataccttacccgacccctttaacccattcatgtcgcataccctcaataaa

SEQ ID NO: 1171 - protein, 724 aa, synthetic construct
  REGION 1..724: note = source = /note="Description of Artificial Sequence: Synthetic polypeptide"
MSFVDHPPDWLEEVGEGLREFLGLEAGPPKPKPNQQHQDQARGLVLPGYNYLGPGNGLDRGEPVNRADEVAREHDISYNEQLEAGDNPYLKYNHADAEFQEKLADDTSFGGNLGKAVFQAKKRVLEPFGLVEEGAKTAPTGKRIDDHFPKRKKARTEEDSKPSTSSDAEAGPSGSQQLQIPAQPASSLGADTMSAGGGGPLGDNNQGADGVGNASGDWHCDSTWMGDRVVTKSTRTWVLPSYNNHQYREIKSGSVDGSNANAYFGYSTPWGYFDFNRFHSHWSPRDWQRLINNYWGFRPRSLRVKIFNIQVKEVTVQDSTTTIANNLTSTVQVFTDDDYQLPYVVGNGTEGCLPAFPPQVFTLPQYGYATLNRDNTENPTERSSFFCLEYFPSKMLRTGNNFEFTYNFEEVPFHSSFAPSQNLFKLANPLVDQYLYRFVSTNNTGGVQFNKNLAGRYANTYKNWFPGPMGRTQGWNLGSGVNRASVSAFATTNRMELEGASYQVPPQPNGMTNNLQGSNTYALENTMIFNSQPANPGTTATYLEGNMLITSESETQPVNRVAYNVGGQMATNNQSSTTAPATGTVNLQEIVPGSVWMERDVYLQGPIWAKIPETGAHFHPSPAMGGFGLKHPPPMMLIKNTPVPGNITSFSDVPVSSFITQYSTGQVTVEMEWELKKENSKRWNPEIQYTNNYNDPQFVDFAPDSTGEYRTTRPIGTRYLTRPL

SEQ ID NO: 1172 - DNA, 2203 bp, synthetic construct
  misc_feature 1..2203: note = source = /note="Description of Artificial Sequence: Synthetic polynucleotide"
  source 1..2203: mol_type = other DNA
atgtcttttgttgatcaccctccagattggttggaagaagttggtgaaggtcttcgcgagtttttgggccttgaagcgggcccaccgaaaccaaaacccaatcagcagcatcaagatcaagcccgtggtcttgtgctgcctggttataactatctcggacccggaaacggtctcgatcgaggagagcctgtcaacagggcagacgaggtcgcgcgagagcacgacatctcgtacaacgagcagcttgaggcgggagacaacccctacctcaagtacaaccacgcggacgccgagtttcaggagaagctcgccgacgacacatccttcgggggaaacctcggaaaggcagtctttcaggccaagaaaagggttctcgaaccttttggcctggttgaagagggtgctaagacggcccctaccggaaagcggatagacgaccactttccaaaaagaaagaaggctcggaccgaagaggactccaagccttccacctcgtcagacgccgaagctggacccagcggatcccagcagctgcaaatcccagcccaaccagcctcaagtttgggagctgatacaatgtctgcgggaggtggcggcccattgggcgacaataaccaaggtgccgatggagtgggcaatgcctcgggagattggcattgcgattccacgtggatgggggacagagtcgtcaccaagtccacccgaacctgggtgctgcccagctacaacaaccaccagtaccgagagatcaaaagcggctccgtcgacggaagcaacgccaacgcctactttggatacagcaccccctgggggtactttgactttaaccgcttccacagccactggagcccccgagactggcaaagactcatcaacaactactggggcttcagaccccggtccctcagagtcaaaatcttcaacattcaagtcaaagaggtcacggtgcaggactccaccaccaccatcgccaacaacctcacctccaccgtccaagtgtttacggacgacgactaccagctgccctacgtcgtcggcaacgggaccgagggatgcctgccggccttccctccgcaggtctttacgctgccgcagtacggttacgcgacgctgaaccgcgacaacacagaaaatcccaccgagaggagcagcttcttctgcctagagtactttcccagcaagatgctgagaacgggcaacaactttgagtttacctacaactttgaggaggtgcccttccactccagcttcgctcccagtcagaacctgttcaagctggccaacccgctggtggaccagtacttgtaccgcttcgtgagcacaaataacactggcggagtccagttcaacaagaacctggccgggagatacgccaacacctacaaaaactggttcccggggcccatgggccgaacccagggctggaacctgggctccggggtcaaccgcgccagtgtcagcgccttcgccacgaccaataggatggagctcgagggcgcgagttaccaggtgcccccgcagccgaacggcatgaccaacaacctccagggcagcaacacctatgccctggagaacactatgatcttcaacagccagccggcgaacccgggcaccaccgccacgtacctcgagggcaacatgctcatcaccagcgagagcgagacgcagccggtgaaccgcgtggcgtacaacgtcggcgggcagatggccaccaacaaccagagctccaccactgcccccgcgaccggcacgtacaacacccaggaaatcgtgcccggcagcgtgtggatggagagggacgtgtacctccaaggacccatctgggccaagatcccagagacgggggcgcactttcacccctctccggccatgggcggattcggactcaaacacccaccgcccatgatgctcatcaagaacacgcctgtgcccggaaatatcaccagcttctcggacgtgcccgtcagcagcttcatcacccagtacagcaccgggcaggtcaccgtggagatggagtgggagctcaagaaggaaaactccaagaggtggaacccagagatccagtacacaaacaactacaacgacccccagtttgtggactttgccccggacagcaccggggaatacagaaccaccagacctatcggaacccgataccttacccgacccctttaacccattcatgtcgcataccctcaataaa

SEQ ID NO: 1173 - protein, 724 aa, synthetic construct
  REGION 1..724: note = source = /note="Description of Artificial Sequence: Synthetic polypeptide"
MSFVDHPPDWLEEVGEGLREFLGLEAGPPKPKPNQQHQDQARGLVLPGYNYLGPGNGLDRGEPVNRADEVAREHDISYNEQLEAGDNPYLKYNHADAEFQEKLADDTSFGGNLGKAVFQAKKRVLEPFGLVEEGAKTAPTGKRIDDHFPKRKKARTEEDSKPSTSSDAEAGPSGSQQLQIPAQPASSLGADTMSAGGGGPLGDNNQGADGVGNASGDWHCDSTWMGDRVVTKSTRTWVLPSYNNHQYREIKSGSVDGSNANAYFGYSTPWGYFDFNRFHSHWSPRDWQRLINNYWGFRPRSLRVKIFNIQVKEVTVQDSTTTIANNLTSTVQVFTDDDYQLPYVVGNGTEGCLPAFPPQVFTLPQYGYATLNRDNTENPTERSSFFCLEYFPSKMLRTGNNFEFTYNFEEVPFHSSFAPSQNLFKLANPLVDQYLYRFVSTNNTGGVQFNKNLAGRYANTYKNWFPGPMGRTQGWNLGSGVNRASVSAFATTNRMELEGASYQVPPQPNGMTNNLQGSNTYALENTMIFNSQPANPGTTATYLEGNMLITSESETQPVNRVAYNVGGQMATNNQSSTTAPATGTYNTQEIVPGSVWMERDVYLQGPIWAKIPETGAHFHPSPAMGGFGLKHPPPMMLIKNTPVPGNITSFSDVPVSSFITQYSTGQVTVEMEWELKKENSKRWNPEIQYTNNYNDPQFVDFAPDSTGEYRTTRPIGTRYLTRPL

SEQ ID NO: 1174 - DNA, 2203 bp, synthetic construct
  misc_feature 1..2203: note = source = /note="Description of Artificial Sequence: Synthetic polynucleotide"
  source 1..2203: mol_type = other DNA
atgtcttttgttgatcaccctccagattggttggaagaagttggtgaaggtcttcgcgagtttttgggccttgaagcgggcccaccgaaaccaaaacccaatcagcagcatcaagatcaagcccgtggtcttgtgctgcctggttataactatctcggacccggaaacggtctcgatcgaggagagcctgtcaacagggcagacgaggtcgcgcgagagcacgacatctcgtacaacgagcagcttgaggcgggagacaacccctacctcaagtacaaccacgcggacgccgagtttcaggagaagctcgccgacgacacatccttcgggggaaacctcggaaaggcagtctttcaggccaagaaaagggttctcgaaccttttggcctggttgaagagggtgctaagacggcccctaccggaaagcggatagacgaccactttccaaaaagaaagaaggctcggaccgaagaggactccaagccttccacctcgtcagacgccgaagctggacccagcggatcccagcagctgcaaatcccagcccaaccagcctcaagtttgggagctgatacaatgtctgcgggaggtggcggcccattgggcgacaataaccaaggtgccgatggagtgggcaatgcctcgggagattggcattgcgattccacgtggatgggggacagagtcgtcaccaagtccacccgaacctgggtgctgcccagctacaacaaccaccagtaccgagagatcaaaagcggctccgtcgacggaagcaacgccaacgcctactttggatacagcaccccctgggggtactttgactttaaccgcttccacagccactggagcccccgagactggcaaagactcatcaacaactactggggcttcagaccccggtccctcagagtcaaaatcttcaacattcaagtcaaagaggtcacggtgcaggactccaccaccaccatcgccaacaacctcacctccaccgtccaagtgtttacggacgacgactaccagctgccctacgtcgtcggcaacgggaccgagggatgcctgccggccttccctccgcaggtctttacgctgccgcagtacggttacgcgacgctgaaccgcgacaacacagaaaatcccaccgagaggagcagcttcttctgcctagagtactttcccagcaagatgctgagaacgggcaacaactttgagtttacctacaactttgaggaggtgcccttccactccagcttcgctcccagtcagaacctgttcaagctggccaacccgctggtggaccagtacttgtaccgcttcgtgagcacaaataacactggcggagtccagttcaacaagaacctggccgggagatacgccaacacctacaaaaactggttcccggggcccatgggccgaacccagggctggaacctgggctccggggtcaaccgcgccagtgtcagcgccttcgccacgaccaataggatggagctcgagggcgcgagttaccaggtgcccccgcagccgaacggcatgaccaacaacctccagggcagcaacacctatgccctggagaacactatgatcttcaacagccagccggcgaacccgggcaccaccgccacgtacctcgagggcaacatgctcatcaccagcgagagcgagacgcagccggtgaaccgcgtggcgtacaacgtcggcgggcagatggccaccaacaaccagagctccaccactgcccccgcgaccggcacggtcaacacccaggaaatcgtgcccggcagcgtgtggatggagagggacgtgtacctccaaggacccatctgggccaagatcccagagacgggggcgcactttcacccctctccggccatgggcggattcggactcaaacacccaccgcccatgatgctcatcaagaacacgcctgtgcccggaaatatcaccagcttctcggacgtgcccgtcagcagcttcatcacccagtacagcaccgggcaggtcaccgtggagatggagtgggagctcaagaaggaaaactccaagaggtggaacccagagatccagtacacaaacaactacaacgacccccagtttgtggactttgccccggacagcaccggggaatacagaaccaccagacctatcggaacccgataccttacccgacccctttaacccattcatgtcgcataccctcaataaa

SEQ ID NO: 1175 - protein, 724 aa, synthetic construct
  REGION 1..724: note = source = /note="Description of Artificial Sequence: Synthetic polypeptide"
MSFVDHPPDWLEEVGEGLREFLGLEAGPPKPKPNQQHQDQARGLVLPGYNYLGPGNGLDRGEPVNRADEVAREHDISYNEQLEAGDNPYLKYNHADAEFQEKLADDTSFGGNLGKAVFQAKKRVLEPFGLVEEGAKTAPTGKRIDDHFPKRKKARTEEDSKPSTSSDAEAGPSGSQQLQIPAQPASSLGADTMSAGGGGPLGDNNQGADGVGNASGDWHCDSTWMGDRVVTKSTRTWVLPSYNNHQYREIKSGSVDGSNANAYFGYSTPWGYFDFNRFHSHWSPRDWQRLINNYWGFRPRSLRVKIFNIQVKEVTVQDSTTTIANNLTSTVQVFTDDDYQLPYVVGNGTEGCLPAFPPQVFTLPQYGYATLNRDNTENPTERSSFFCLEYFPSKMLRTGNNFEFTYNFEEVPFHSSFAPSQNLFKLANPLVDQYLYRFVSTNNTGGVQFNKNLAGRYANTYKNWFPGPMGRTQGWNLGSGVNRASVSAFATTNRMELEGASYQVPPQPNGMTNNLQGSNTYALENTMIFNSQPANPGTTATYLEGNMLITSESETQPVNRVAYNVGGQMATNNQSSTTAPATGTVNTQEIVPGSVWMERDVYLQGPIWAKIPETGAHFHPSPAMGGFGLKHPPPMMLIKNTPVPGNITSFSDVPVSSFITQYSTGQVTVEMEWELKKENSKRWNPEIQYTNNYNDPQFVDFAPDSTGEYRTTRPIGTRYLTRPL

SEQ ID NO: 1176 - DNA, 2203 bp, synthetic construct
  misc_feature 1..2203: note = source = /note="Description of Artificial Sequence: Synthetic polynucleotide"
  source 1..2203: mol_type = other DNA
atgtcttttgttgatcaccctccagattggttggaagaagttggtgaaggtcttcgcgagtttttgggccttgaagcgggcccaccgaaaccaaaacccaatcagcagcatcaagatcaagcccgtggtcttgtgctgcctggttataactatctcggacccggaaacggtctcgatcgaggagagcctgtcaacagggcagacgaggtcgcgcgagagcacgacatctcgtacaacgagcagcttgaggcgggagacaacccctacctcaagtacaaccacgcggacgccgagtttcaggagaagctcgccgacgacacatccttcgggggaaacctcggaaaggcagtctttcaggccaagaaaagggttctcgaaccttttggcctggttgaagagggtgctaagacggcccctaccggaaagcggatagacgaccactttccaaaaagaaagaaggctcggaccgaagaggactccaagccttccacctcgtcagacgccgaagctggacccagcggatcccagcagctgcaaatcccagcccaaccagcctcaagtttgggagctgatacaatgtctgcgggaggtggcggcccattgggcgacaataaccaaggtgccgatggagtgggcaatgcctcgggagattggcattgcgattccacgtggatgggggacagagtcgtcaccaagtccacccgaacctgggtgctgcccagctacaacaaccaccagtaccgagagatcaaaagcggctccgtcgacggaagcaacgccaacgcctactttggatacagcaccccctgggggtactttgactttaaccgcttccacagccactggagcccccgagactggcaaagactcatcaacaactactggggcttcagaccccggtccctcagagtcaaaatcttcaacattcaagtcaaagaggtcacggtgcaggactccaccaccaccatcgccaacaacctcacctccaccgtccaagtgtttacggacgacgactaccagctgccctacgtcgtcggcaacgggaccgagggatgcctgccggccttccctccgcaggtctttacgctgccgcagtacggttacgcgacgctgaaccgcgacaacacagaaaatcccaccgagaggagcagcttcttctgcctagagtactttcccagcaagatgctgagaacgggcaacaactttgagtttacctacaactttgaggaggtgcccttccactccagcttcgctcccagtcagaacctgttcaagctggccaacccgctggtggaccagtacttgtaccgcttcgtgagcacaaataacactggcggagtccagttcaacaagaacctggccgggagatacgccaacacctacaaaaactggttcccggggcccatgggccgaacccagggctggaacctgggctccggggtcaaccgcgccagtgtcagcgccttcgccacgaccaataggatggagctcgagggcgcgagttaccaggtgcccccgcagccgaacggcatgaccaacaacctccagggcagcaacacctatgccctggagaacactatgatcttcaacagccagccggcgaacccgggcaccaccgccacgtacctcgagggcaacatgctcatcaccagcgagagcgagacgcagccggtgaaccgcgtggcgtacaacgtcggcgggcagatggccaccaacaaccagagctccaccactgcccccgcgaccggcacgtacaacctccaggaaatcgtgcccggcagcgtgtggatggagagggacgtgtacctccaaggacccatctgggccaagatcccagagacgggggcgcactttcacccctctccggccatgggcggattcggactcaaacacccaccgcccatgatgctcatcaagaacacgcctgtgcccggaaatatcaccagcttctcggccgtgcccgtcagcagcttcatcacccagtacagcaccgggcaggtcaccgtggagatggagtgggagctcaagaaggaaaactccaagaggtggaacccagagatccagtacacaaacaactacaacgacccccagtttgtggactttgccccggacagcaccggggaatacagaaccaccagacctatcggaacccgataccttacccgacccctttaacccattcatgtcgcataccctcaataaa

SEQ ID NO: 1177 - protein, 724 aa, synthetic construct
  REGION 1..724: note = source = /note="Description of Artificial Sequence: Synthetic polypeptide"
MSFVDHPPDWLEEVGEGLREFLGLEAGPPKPKPNQQHQDQARGLVLPGYNYLGPGNGLDRGEPVNRADEVAREHDISYNEQLEAGDNPYLKYNHADAEFQEKLADDTSFGGNLGKAVFQAKKRVLEPFGLVEEGAKTAPTGKRIDDHFPKRKKARTEEDSKPSTSSDAEAGPSGSQQLQIPAQPASSLGADTMSAGGGGPLGDNNQGADGVGNASGDWHCDSTWMGDRVVTKSTRTWVLPSYNNHQYREIKSGSVDGSNANAYFGYSTPWGYFDFNRFHSHWSPRDWQRLINNYWGFRPRSLRVKIFNIQVKEVTVQDSTTTIANNLTSTVQVFTDDDYQLPYVVGNGTEGCLPAFPPQVFTLPQYGYATLNRDNTENPTERSSFFCLEYFPSKMLRTGNNFEFTYNFEEVPFHSSFAPSQNLFKLANPLVDQYLYRFVSTNNTGGVQFNKNLAGRYANTYKNWFPGPMGRTQGWNLGSGVNRASVSAFATTNRMELEGASYQVPPQPNGMTNNLQGSNTYALENTMIFNSQPANPGTTATYLEGNMLITSESETQPVNRVAYNVGGQMATNNQSSTTAPATGTYNLQEIVPGSVWMERDVYLQGPIWAKIPETGAHFHPSPAMGGFGLKHPPPMMLIKNTPVPGNITSFSAVPVSSFITQYSTGQVTVEMEWELKKENSKRWNPEIQYTNNYNDPQFVDFAPDSTGEYRTTRPIGTRYLTRPL

SEQ ID NO: 1178 - DNA, 2203 bp, synthetic construct
  misc_feature 1..2203: note = source = /note="Description of Artificial Sequence: Synthetic polynucleotide"
  source 1..2203: mol_type = other DNA
atgtcttttgttgatcaccctccagattggttggaagaagttggtgaaggtcttcgcgagtttttgggccttgaagcgggcccaccgaaaccaaaacccaatcagcagcatcaagatcaagcccgtggtcttgtgctgcctggttataactatctcggacccggaaacggtctcgatcgaggagagcctgtcaacagggcagacgaggtcgcgcgagagcacgacatctcgtacaacgagcagcttgaggcgggagacaacccctacctcaagtacaaccacgcggacgccgagtttcaggagaagctcgccgacgacacatccttcgggggaaacctcggaaaggcagtctttcaggccaagaaaagggttctcgaaccttttggcctggttgaagagggtgctaagacggcccctaccggaaagcggatagacgaccactttccaaaaagaaagaaggctcggaccgaagaggactccaagccttccacctcgtcagacgccgaagctggacccagcggatcccagcagctgcaaatcccagcccaaccagcctcaagtttgggagctgatacaatgtctgcgggaggtggcggcccattgggcgacaataaccaaggtgccgatggagtgggcaatgcctcgggagattggcattgcgattccacgtggatgggggacagagtcgtcaccaagtccacccgaacctgggtgctgcccagctacaacaaccaccagtaccgagagatcaaaagcggctccgtcgacggaagcaacgccaacgcctactttggatacagcaccccctgggggtactttgactttaaccgcttccacagccactggagcccccgagactggcaaagactcatcaacaactactggggcttcagaccccggtccctcagagtcaaaatcttcaacattcaagtcaaagaggtcacggtgcaggactccaccaccaccatcgccaacaacctcacctccaccgtccaagtgtttatggacgacgactaccagctgccctacgtcgtcggcaacgggaccgagggatgcctgccggccttccctccgcaggtctttacgctgccgcagtacggttacgcgacgctgaaccgcgacaacacagaaaatcccaccgagaggagcagcttcttctgcctagagtactttcccagcaagatgctgagaacgggcaacaactttgagtttacctacaactttgaggaggtgcccttccactccagcttcgctcccagtcagaacctgttcaagctggccaacccgctggtggaccagtacttgtaccgcttcgtgagcacaaataacactggcggagtccagttcaacaagaacctggccgggagatacgccaacacctacaaaaactggttcccggggcccatgggccgaacccagggctggaacctgggctccggggtcaaccgcgccagtgtcagcgccttcgccacgaccaataggatggagctcgagggcgcgagttaccaggtgcccccgcagccgaacggcatgaccaacaacctccagggcagcaacacctatgccctggagaacactatgatcttcaacagccagccggcgaacccgggcaccaccgccacgtacctcgagggcaacatgctcatcaccagcgagagcgagacgcagccggtgaaccgcgtggcgtacaacgtcggcgggcagatggccaccaacaaccagagctccaccactgcccccgcgaccggcacgtacaacctccaggaaatcgtgcccggcagcgtgtggatggagagggacgtgtacctccaaggacccatctgggccaagatcccagagacgggggcgcactttcacccctctccggccatgggcggattcggactcaaacacccaccgcccatgatgctcatcaagaacacgcctgtgcccggaaatatcaccagcttctcggacgtgcccgtcagcagcttcatcacccagtacagcaccgggcaggtcaccgtggagatggagtgggagctcaagaaggaaaactccaagaggtggaacccagagatccagtacacaaacaactacaacgacccccagtttgtggactttgccccggacagcaccggggaatacagaaccaccagacctatcggaacccgataccttacccgacccctttaacccattcatgtcgcataccctcaataaa

SEQ ID NO: 1179 - protein, 724 aa, synthetic construct
  REGION 1..724: note = source = /note="Description of Artificial Sequence: Synthetic polypeptide"
MSFVDHPPDWLEEVGEGLREFLGLEAGPPKPKPNQQHQDQARGLVLPGYNYLGPGNGLDRGEPVNRADEVAREHDISYNEQLEAGDNPYLKYNHADAEFQEKLADDTSFGGNLGKAVFQAKKRVLEPFGLVEEGAKTAPTGKRIDDHFPKRKKARTEEDSKPSTSSDAEAGPSGSQQLQIPAQPASSLGADTMSAGGGGPLGDNNQGADGVGNASGDWHCDSTWMGDRVVTKSTRTWVLPSYNNHQYREIKSGSVDGSNANAYFGYSTPWGYFDFNRFHSHWSPRDWQRLINNYWGFRPRSLRVKIFNIQVKEVTVQDSTTTIANNLTSTVQVFMDDDYQLPYVVGNGTEGCLPAFPPQVFTLPQYGYATLNRDNTENPTERSSFFCLEYFPSKMLRTGNNFEFTYNFEEVPFHSSFAPSQNLFKLANPLVDQYLYRFVSTNNTGGVQFNKNLAGRYANTYKNWFPGPMGRTQGWNLGSGVNRASVSAFATTNRMELEGASYQVPPQPNGMTNNLQGSNTYALENTMIFNSQPANPGTTATYLEGNMLITSESETQPVNRVAYNVGGQMATNNQSSTTAPATGTYNLQEIVPGSVWMERDVYLQGPIWAKIPETGAHFHPSPAMGGFGLKHPPPMMLIKNTPVPGNITSFSDVPVSSFITQYSTGQVTVEMEWELKKENSKRWNPEIQYTNNYNDPQFVDFAPDSTGEYRTTRPIGTRYLTRPL

SEQ ID NO: 1180 - DNA, 2203 bp, synthetic construct
  misc_feature 1..2203: note = source = /note="Description of Artificial Sequence: Synthetic polynucleotide"
  source 1..2203: mol_type = other DNA
atgtcttttgttgatcaccctccagattggttggaagaagttggtgaaggtcttcgcgagtttttgggccttgaagcgggcccaccgaaaccaaaacccaatcagcagcatcaagatcaagcccgtggtcttgtgctgcctggttataactatctcggacccggaaacggtctcgatcgaggagagcctgtcaacagggcagacgaggtcgcgcgagagcacgacatctcgtacaacgagcagcttgaggcgggagacaacccctacctcaagtacaaccacgcggacgccgagtttcaggagaagctcgccgacgacacatccttcgggggaaacctcggaaaggcagtctttcaggccaagaaaagggttctcgaaccttttggcctggttgaagagggtgctaagacggcccctaccggaaagcggatagacgaccactttccaaaaagaaagaaggctcggaccgaagaggactccaagccttccacctcgtcagacgccgaagctggacccagcggatcccagcagctgcaaatcccagcccaaccagcctcaagtttgggagctgatacaatgtctgcgggaggtggcggcccattgggcgacaataaccaaggtgccgatggagtgggcaatgcctcgggagattggcattgcgattccacgtggatgggggacagagtcgtcaccaagtccacccgaacctgggtgctgcccagctacaacaaccaccagtaccgagagatcaaaagcggctccgtcgacggaagcaacgccaacgcctactttggatacagcaccccctgggggtactttgactttaaccgcttccacagccactggagcccccgagactggcaaagactcatcaacaactactggggcttcagaccccggtccctcagagtcaaaatcttcaacattcaagtcaaagaggtcacggtgcaggactccaccaccaccatcgccaacaacctcacctccaccgtcgatgtgtttacggacgacgactaccagctgccctacgtcgtcggcaacgggaccgagggatgcctgccggccttccctccgcaggtctttacgctgccgcagtacggttacgcgacgctgaaccgcgacaacacagaaaatcccaccgagaggagcagcttcttctgcctagagtactttcccagcaagatgctgagaacgggcaacaactttgagtttacctacaactttgaggaggtgcccttccactccagcttcgctcccagtcagaacctgttcaagctggccaacccgctggtggaccagtacttgtaccgcttcgtgagcacaaataacactggcggagtccagttcaacaagaacctggccgggagatacgccaacacctacaaaaactggttcccggggcccatgggccgaacccagggctggaacctgggctccggggtcaaccgcgccagtgtcagcgccttcgccacgaccaataggatggagctcgagggcgcgagttaccaggtgcccccgcagccgaacggcatgaccaacaacctccagggcagcaacacctatgccctggagaacactatgatcttcaacagccagccggcgaacccgggcaccaccgccacgtacctcgagggcaacatgctcatcaccagcgagagcgagacgcagccggtgaaccgcgtggcgtacaacgtcggcgggcagatggccaccaacaaccagagctccaccactgcccccgcgaccggcacgtacaacctccaggaaatcgtgcccggcagcgtgtggatggagagggacgtgtacctccaaggacccatctgggccaagatcccagagacgggggcgcactttcacccctctccggccatgggcggattcggactcaaacacccaccgcccatgatgctcatcaagaacacgcctgtgcccggaaatatcaccagcttctcggacgtgcccgtcagcagcttcatcacccagtacagcaccgggcaggtcaccgtggagatggagtgggagctcaagaaggaaaactccaagaggtggaacccagagatccagtacacaaacaactacaacgacccccagtttgtggactttgccccggacagcaccggggaatacagaaccaccagacctatcggaacccgataccttacccgacccctttaacccattcatgtcgcataccctcaataaa

SEQ ID NO: 1181 - protein, 724 aa, synthetic construct
  REGION 1..724: note = source = /note="Description of Artificial Sequence: Synthetic polypeptide"
MSFVDHPPDWLEEVGEGLREFLGLEAGPPKPKPNQQHQDQARGLVLPGYNYLGPGNGLDRGEPVNRADEVAREHDISYNEQLEAGDNPYLKYNHADAEFQEKLADDTSFGGNLGKAVFQAKKRVLEPFGLVEEGAKTAPTGKRIDDHFPKRKKARTEEDSKPSTSSDAEAGPSGSQQLQIPAQPASSLGADTMSAGGGGPLGDNNQGADGVGNASGDWHCDSTWMGDRVVTKSTRTWVLPSYNNHQYREIKSGSVDGSNANAYFGYSTPWGYFDFNRFHSHWSPRDWQRLINNYWGFRPRSLRVKIFNIQVKEVTVQDSTTTIANNLTSTVDVFTDDDYQLPYVVGNGTEGCLPAFPPQVFTLPQYGYATLNRDNTENPTERSSFFCLEYFPSKMLRTGNNFEFTYNFEEVPFHSSFAPSQNLFKLANPLVDQYLYRFVSTNNTGGVQFNKNLAGRYANTYKNWFPGPMGRTQGWNLGSGVNRASVSAFATTNRMELEGASYQVPPQPNGMTNNLQGSNTYALENTMIFNSQPANPGTTATYLEGNMLITSESETQPVNRVAYNVGGQMATNNQSSTTAPATGTYNLQEIVPGSVWMERDVYLQGPIWAKIPETGAHFHPSPAMGGFGLKHPPPMMLIKNTPVPGNITSFSDVPVSSFITQYSTGQVTVEMEWELKKENSKRWNPEIQYTNNYNDPQFVDFAPDSTGEYRTTRPIGTRYLTRPL

SEQ ID NO: 1182 - DNA, 2203 bp, synthetic construct
  misc_feature 1..2203: note = source = /note="Description of Artificial Sequence: Synthetic polynucleotide"
  source 1..2203: mol_type = other DNA
atgtcttttgttgatcaccctccagattggttggaagaagttggtgaaggtcttcgcgagtttttgggccttgaagcgggcccaccgaaaccaaaacccaatcagcagcatcaagatcaagcccgtggtcttgtgctgcctggttataactatctcggacccggaaacggtctcgatcgaggagagcctgtcaacagggcagacgaggtcgcgcgagagcacgacatctcgtacaacgagcagcttgaggcgggagacaacccctacctcaagtacaaccacgcggacgccgagtttcaggagaagctcgccgacgacacatccttcgggggaaacctcggaaaggcagtctttcaggccaagaaaagggttctcgaaccttttggcctggttgaagagggtgctaagacggcccctaccggaaagcggatagacgaccactttccaaaaagaaagaaggctcggaccgaagaggactccaagccttccacctcgtcagacgccgaagctggacccagcggatcccagcagctgcaaatcccagcccaaccagcctcaagtttgggagctgatacaatgtctgcgggaggtggcggcccattgggcgacaataaccaaggtgccgatggagtgggcaatgcctcgggagattggcattgcgattccacgtggatgggggacagagtcgtcaccaagtccacccgaacctgggtgctgcccagctacaacaaccaccagtaccgagagatcaaaagcggctccgtcgacggaagcaacgccaacgcctactttggatacagcaccccctgggggtactttgactttaaccgcttccacagccactggagcccccgagactggcaaagactcatcaacaactactggggcttcagaccccggtccctcagagtcaaaatcttcaacattcaagtcaaagaggtcacggtgcaggactccaccaccaccatcgccaacaacctcacctccaccgtccaagtgtttacggacgacgactaccagctgccctacgtcgtcggcaacgggacccagggatgcctgccggccttccctccgcaggtctttacgctgccgcagtacggttacgcgacgctgaaccgcgacaacacagaaaatcccaccgagaggagcagcttcttctgcctagagtactttcccagcaagatgctgagaacgggcaacaactttgagtttacctacaactttgaggaggtgcccttccactccagcttcgctcccagtcagaacctgttcaagctggccaacccgctggtggaccagtacttgtaccgcttcgtgagcacaaataacactggcggagtccagttcaacaagaacctggccgggagatacgccaacacctacaaaaactggttcccggggcccatgggccgaacccagggctggaacctgggctccggggtcaaccgcgccagtgtcagcgccttcgccacgaccaataggatggagctcgagggcgcgagttaccaggtgcccccgcagccgaacggcatgaccaacaacctccagggcagcaacacctatgccctggagaacactatgatcttcaacagccagccggcgaacccgggcaccaccgccacgtacctcgagggcaacatgctcatcaccagcgagagcgagacgcagccggtgaaccgcgtggcgtacaacgtcggcgggcagatggccaccaacaaccagagctccaccactgcccccgcgaccggcacgtacaacctccaggaaatcgtgcccggcagcgtgtggatggagagggacgtgtacctccaaggacccatctgggccaagatcccagagacgggggcgcactttcacccctctccggccatgggcggattcggactcaaacacccaccgcccatgatgctcatcaagaacacgcctgtgcccggaaatatcaccagcttctcggacgtgcccgtcagcagcttcatcacccagtacagcaccgggcaggtcaccgtggagatggagtgggagctcaagaaggaaaactccaagaggtggaacccagagatccagtacacaaacaactacaacgacccccagtttgtggactttgccccggacagcaccggggaatacagaaccaccagacctatcggaacccgataccttacccgacccctttaacccattcatgtcgcataccctcaataaa

SEQ ID NO: 1183 - protein, 724 aa, synthetic construct
  REGION 1..724: note = source = /note="Description of Artificial Sequence: Synthetic polypeptide"
MSFVDHPPDWLEEVGEGLREFLGLEAGPPKPKPNQQHQDQARGLVLPGYNYLGPGNGLDRGEPVNRADEVAREHDISYNEQLEAGDNPYLKYNHADAEFQEKLADDTSFGGNLGKAVFQAKKRVLEPFGLVEEGAKTAPTGKRIDDHFPKRKKARTEEDSKPSTSSDAEAGPSGSQQLQIPAQPASSLGADTMSAGGGGPLGDNNQGADGVGNASGDWHCDSTWMGDRVVTKSTRTWVLPSYNNHQYREIKSGSVDGSNANAYFGYSTPWGYFDFNRFHSHWSPRDWQRLINNYWGFRPRSLRVKIFNIQVKEVTVQDSTTTIANNLTSTVQVFTDDDYQLPYVVGNGTQGCLPAFPPQVFTLPQYGYATLNRDNTENPTERSSFFCLEYFPSKMLRTGNNFEFTYNFEEVPFHSSFAPSQNLFKLANPLVDQYLYRFVSTNNTGGVQFNKNLAGRYANTYKNWFPGPMGRTQGWNLGSGVNRASVSAFATTNRMELEGASYQVPPQPNGMTNNLQGSNTYALENTMIFNSQPANPGTTATYLEGNMLITSESETQPVNRVAYNVGGQMATNNQSSTTAPATGTYNLQEIVPGSVWMERDVYLQGPIWAKIPETGAHFHPSPAMGGFGLKHPPPMMLIKNTPVPGNITSFSDVPVSSFITQYSTGQVTVEMEWELKKENSKRWNPEIQYTNNYNDPQFVDFAPDSTGEYRTTRPIGTRYLTRPL

SEQ ID NO: 1184 - DNA, 2203 bp, synthetic construct
  misc_feature 1..2203: note = source = /note="Description of Artificial Sequence: Synthetic polynucleotide"
  source 1..2203: mol_type = other DNA
atgtcttttgttgatcaccctccagattggttggaagaagttggtgaaggtcttcgcgagtttttgggccttgaagcgggcccaccgaaaccaaaacccaatcagcagcatcaagatcaagcccgtggtcttgtgctgcctggttataactatctcggacccggaaacggtctcgatcgaggagagcctgtcaacagggcagacgaggtcgcgcgagagcacgacatctcgtacaacgagcagcttgaggcgggagacaacccctacctcaagtacaaccacgcggacgccgagtttcaggagaagctcgccgacgacacatccttcgggggaaacctcggaaaggcagtctttcaggccaagaaaagggttctcgaaccttttggcctggttgaagagggtgctaagacggcccctaccggaaagcggatagacgaccactttccaaaaagaaagaaggctcggaccgaagaggactccaagccttccacctcgtcagacgccgaagctggacccagcggatcccagcagctgcaaatcccagcccaaccagcctcaagtttgggagctgatacaatgtctgcgggaggtggcggcccattgggcgacaataaccaaggtgccgatggagtgggcaatgcctcgggagattggcattgcgattccacgtggatgggggacagagtcgtcaccaagtccacccgaacctgggtgctgcccagctacaacaaccaccagtaccgagagatcaaaagcggctccgtcgacggaagcaacgccaacgcctactttggatacagcaccccctgggggtactttgactttaaccgcttccacagccactggagcccccgagactggcaaagactcatcaacaactactggggcttcagaccccggtccctcagagtcaaaatcttcaacattcaagtcaaagaggtcacggtgcaggactccaccaccaccatcgccaacaacctcacctccaccgtccaagtgtttacggacgacgactaccagctgccctacgtcgtcggcaacgggaccgagggatgcctgccggccttccctccgcaggtctttacgctgccgcagtacggttacgcgacgctgaaccgcgacaacacagaaaatcccaccgagaggagcagcttcttctgcctagagtactttcccagcaagatgctgagaacgggcaacaactttgagtttacctacaactttgaggaggtgcccttccactccagcttcgctcccagtcagaacctgttcaagctggccaacccgctggtggaccagtacttgtaccgcttcgtgagcacaaataacactggcggagtccagttcaacaagaacctggccgggagatacgccaacacctacaaaaactggttcccggggcccatgggccgaacccagggctggaacctgggctccggggtcaaccgcgccagtgtcagcgccttcgccacgaccaataggatggagctcgagggcgcgagttaccaggtgcccccgcagccgaacggcatgaccaacaacctccagggcagcaacacctatgccctggagaacactatgatcttcaacagccagtcggcgaacccgggcaccaccgccacgtacctcgagggcaacatgctcatcaccagcgagagcgagacgcagccggtgaaccgcgtggcgtacaacgtcggcgggcagatggccaccaacaaccagagctccaccactgcccccgcgaccggcacgtacaacctccaggaaatcgtgcccggcagcgtgtggatggagagggacgtgtacctccaaggacccatctgggccaagatcccagagacgggggcgcactttcacccctctccggccatgggcggattcggactcaaacacccaccgcccatgatgctcatcaagaacacgcctgtgcccggaaatatcaccagcttctcggacgtgcccgtcagcagcttcatcacccagtacagcaccgggcaggtcaccgtggagatggagtgggagctcaagaaggaaaactccaagaggtggaacccagagatccagtacacaaacaactacaacgacccccagtttgtggactttgccccggacagcaccggggaatacagaaccaccagacctatcggaacccgataccttacccgacccctttaacccattcatgtcgcataccctcaataaa

SEQ ID NO: 1185 - protein, 724 aa, synthetic construct
  REGION 1..724: note = source = /note="Description of Artificial Sequence: Synthetic polypeptide"
MSFVDHPPDWLEEVGEGLREFLGLEAGPPKPKPNQQHQDQARGLVLPGYNYLGPGNGLDRGEPVNRADEVAREHDISYNEQLEAGDNPYLKYNHADAEFQEKLADDTSFGGNLGKAVFQAKKRVLEPFGLVEEGAKTAPTGKRIDDHFPKRKKARTEEDSKPSTSSDAEAGPSGSQQLQIPAQPASSLGADTMSAGGGGPLGDNNQGADGVGNASGDWHCDSTWMGDRVVTKSTRTWVLPSYNNHQYREIKSGSVDGSNANAYFGYSTPWGYFDFNRFHSHWSPRDWQRLINNYWGFRPRSLRVKIFNIQVKEVTVQDSTTTIANNLTSTVQVFTDDDYQLPYVVGNGTEGCLPAFPPQVFTLPQYGYATLNRDNTENPTERSSFFCLEYFPSKMLRTGNNFEFTYNFEEVPFHSSFAPSQNLFKLANPLVDQYLYRFVSTNNTGGVQFNKNLAGRYANTYKNWFPGPMGRTQGWNLGSGVNRASVSAFATTNRMELEGASYQVPPQPNGMTNNLQGSNTYALENTMIFNSQSANPGTTATYLEGNMLITSESETQPVNRVAYNVGGQMATNNQSSTTAPATGTYNLQEIVPGSVWMERDVYLQGPIWAKIPETGAHFHPSPAMGGFGLKHPPPMMLIKNTPVPGNITSFSDVPVSSFITQYSTGQVTVEMEWELKKENSKRWNPEIQYTNNYNDPQFVDFAPDSTGEYRTTRPIGTRYLTRPL

SEQ ID NO: 1186 - DNA, 2203 bp, synthetic construct
  misc_feature 1..2203: note = source = /note="Description of Artificial Sequence: Synthetic polynucleotide"
  source 1..2203: mol_type = other DNA
atgtcttttgttgatcaccctccagattggttggaagaagttggtgaaggtcttcgcgagtttttgggccttgaagcgggcccaccgaaaccaaaacccaatcagcagcatcaagatcaagcccgtggtcttgtgctgcctggttataactatctcggacccggaaacggtctcgatcgaggagagcctgtcaacagggcagacgaggtcgcgcgagagcacgacatctcgtacaacgagcagcttgaggcgggagacaacccctacctcaagtacaaccacgcggacgccgagtttcaggagaagctcgccgacgacacatccttcgggggaaacctcggaaaggcagtctttcaggccaagaaaagggttctcgaaccttttggcctggttgaagagggtgctaagacggcccctaccggaaagcggatagacgaccactttccaaaaagaaagaaggctcggaccgaagaggactccaagccttccacctcgtcagacgccgaagctggacccagcggatcccagcagctgcaaatcccagcccaaccagcctcaagtttgggagctgatacaatgtctgcgggaggtggcggcccattgggcgacaataaccaaggtgccgatggagtgggcaatgcctcgggagattggcattgcgattccacgtggatgggggacagagtcgtcaccaagtccacccgaacctgggtgctgcccagctacaacaaccaccagtaccgagagatcaaaagcggctccgtcgacggaagcaacgccaacgcctactttggatacagcaccccctgggggtactttgactttaaccgcttccacagccactggagcccccgagactggcaaagactcatcaacaactactggggcttcagaccccggtccctcagagtcaaaatcttcaacattcaagtcaaagaggtcacggtgcaggactccaccaccaccatcgccaacaacctcacctccaccgtccaagtgtttacggacgacgactaccagctgccctacgtcgtcggcaacgggaccgagggatgcctgccggccttccctccgcaggtctttacgctgccgcagtacggttacgcgacgctgaaccgcgacaacacagaaaatcccaccgagaggagcagcttcttctgcctagagtactttcccagcaagatgctgagaacgggcaacaactttgagtttacctacaactttgaggaggtgcccttccactccagcttcgctcccagtcagaacctgttcaagctggccaacccgctggtggaccagtacttgtaccgcttcgtgagcacaaataacactggcggagtccagttcaacaagaacctggccgggagatacgccaacacctacaaaaactggttcccggggcccatgggccgaacccagggctggaacctgggctccggggtcaaccgcgccagtgtcagcgccttcgccacgaccaataggatggagctcgagggcgcgagttaccaggtgcccccgcagccgaacggcatgaccaacaacctccagggcagcaacacctatgccctggagaacactatgatcttcaacagccagggggcgaacccgggcaccaccgccacgtacctcgagggcaacatgctcatcaccagcgagagcgagacgcagccggtgaaccgcgtggcgtacaacgtcggcgggcagatggccaccaacaaccagagctccaccactgcccccgcgaccggcacgtacaacctccaggaaatcgtgcccggcagcgtgtggatggagagggacgtgtacctccaaggacccatctgggccaagatcccagagacgggggcgcactttcacccctctccggccatgggcggattcggactcaaacacccaccgcccatgatgctcatcaagaacacgcctgtgcccggaaatatcaccagcttctcggacgtgcccgtcagcagcttcatcacccagtacagcaccgggcaggtcaccgtggagatggagtgggagctcaagaaggaaaactccaagaggtggaacccagagatccagtacacaaacaactacaacgacccccagtttgtggactttgccccggacagcaccggggaatacagaaccaccagacctatcggaacccgataccttacccgacccctttaacccattcatgtcgcataccctcaataaa

SEQ ID NO: 1187 - protein, 724 aa, synthetic construct
  REGION 1..724: note = source = /note="Description of Artificial Sequence: Synthetic polypeptide"
MSFVDHPPDWLEEVGEGLREFLGLEAGPPKPKPNQQHQDQARGLVLPGYNYLGPGNGLDRGEPVNRADEVAREHDISYNEQLEAGDNPYLKYNHADAEFQEKLADDTSFGGNLGKAVFQAKKRVLEPFGLVEEGAKTAPTGKRIDDHFPKRKKARTEEDSKPSTSSDAEAGPSGSQQLQIPAQPASSLGADTMSAGGGGPLGDNNQGADGVGNASGDWHCDSTWMGDRVVTKSTRTWVLPSYNNHQYREIKSGSVDGSNANAYFGYSTPWGYFDFNRFHSHWSPRDWQRLINNYWGFRPRSLRVKIFNIQVKEVTVQDSTTTIANNLTSTVQVFTDDDYQLPYVVGNGTEGCLPAFPPQVFTLPQYGYATLNRDNTENPTERSSFFCLEYFPSKMLRTGNNFEFTYNFEEVPFHSSFAPSQNLFKLANPLVDQYLYRFVSTNNTGGVQFNKNLAGRYANTYKNWFPGPMGRTQGWNLGSGVNRASVSAFATTNRMELEGASYQVPPQPNGMTNNLQGSNTYALENTMIFNSQGANPGTTATYLEGNMLITSESETQPVNRVAYNVGGQMATNNQSSTTAPATGTYNLQEIVPGSVWMERDVYLQGPIWAKIPETGAHFHPSPAMGGFGLKHPPPMMLIKNTPVPGNITSFSDVPVSSFITQYSTGQVTVEMEWELKKENSKRWNPEIQYTNNYNDPQFVDFAPDSTGEYRTTRPIGTRYLTRPL

SEQ ID NO: 1188 - DNA, 2194 bp, synthetic construct
  misc_feature 1..2194: note = source = /note="Description of Artificial Sequence: Synthetic polynucleotide"
  source 1..2194: mol_type = other DNA
atgtcttttgttgatcaccctccagattggttggaagaagttggtgaaggtcttcgcgagtttttgggccttgaagcgggcccaccgaaaccaaaacccaatcagcagcatcaagatcaagcccgtggtcttgtgctgcctggttataactatctcggacccggaaacggtctcgatcgaggagagcctgtcaacagggcagacgaggtcgcgcgagagcacgacatctcgtacaacgagcagcttgaggcgggagacaacccctacctcaagtacaaccacgcggacgccgagtttcaggagaagctcgccgacgacacatccttcgggggaaacctcggaaaggcagtctttcaggccaagaaaagggttctcgaaccttttggcctggttgaagagggtgctaagacggcccctaccggaaagcggatagacgaccactttccaaaaagaaagaaggctcggaccgaagaggactccaagccttccacctcgtcagacgccgaagctggacccagcggatcccagcagctgcaaatcccagcccaaccagcctcaagtttgggagctgatacaatgtctgcgggaggtggcggcccattgggcgacaataaccaaggtgccgatggagtgggcaatgcctcgggagattggcattgcgattccacgtggatgggggacagagtcgtcaccaagtccacccgaacctgggtgctgcccagctacaacaaccaccagtaccgagagatcaaaagcggctccgtcgacggaagcaacgccaacgcctactttggatacagcaccccctgggggtactttgactttaaccgcttccacagccactggagcccccgagactggcaaagactcatcaacaactactggggcttcagaccccggtccctcagagtcaaaatcttcaacattcaagtcaaagaggtcacggtgcaggactccaccaccaccatcgccaacaacctcacctccaccgtccaagtgtttacggacgacgactaccagctgccctacgtcgtcggcaacgggaccgagggatgcctgccggccttccctccgcaggtctttacgctgccgcagtacggttacgcgacgctgaaccgcgacaacacagaaaatcccaccgagaggagcagcttcttctgcctagagtactttcccagcaagatgctgagaacgggcaacaactttgagtttacctacaactttgaggaggtgcccttccactccagcttcgctcccagtcagaacctgttcaagctggccaacccgctggtggaccagtacttgtaccgcttcgtgagcacaaataacactggcggagtccagttcaacaagaacctggccgggagatacgccaacacctacaaaaactggttcccggggcccatgggccgaacccagggctggaacctgggctccggggtcaaccgcgccagtgtcagcgccttcgccacgaccaataggatggagctcgagggcgcgagttaccaggtgcccccgcagccgaacggcatgaccaacaacctccagggcagcaacacctatgccctggagaacactatgatcttcgggaagcaaggctcagagaaaacaaatgtggacattgaaaaggtcatgatcaccagcgagagcgagacgcagccggtgaaccgcgtggcgtacaacgtcggcgggcagatggccaccaacaaccagagctccaccactgcccccgcgaccggcacgtacaacctccaggaaatcgtgcccggcagcgtgtggatggagagggacgtgtacctccaaggacccatctgggccaagatcccagagacgggggcgcactttcacccctctccggccatgggcggattcggactcaaacacccaccgcccatgatgctcatcaagaacacgcctgtgcccggaaatatcaccagcttctcggacgtgcccgtcagcagcttcatcacccagtacagcaccgggcaggtcaccgtggagatggagtgggagctcaagaaggaaaactccaagaggtggaacccagagatccagtacacaaacaactacaacgacccccagtttgtggactttgccccggacagcaccggggaatacagaaccaccagacctatcggaacccgataccttacccgacccctttaacccattcatgtcgcataccctcaataaa

SEQ ID NO: 1189 - protein, 721 aa, synthetic construct
  REGION 1..721: note = source = /note="Description of Artificial Sequence: Synthetic polypeptide"
MSFVDHPPDWLEEVGEGLREFLGLEAGPPKPKPNQQHQDQARGLVLPGYNYLGPGNGLDRGEPVNRADEVAREHDISYNEQLEAGDNPYLKYNHADAEFQEKLADDTSFGGNLGKAVFQAKKRVLEPFGLVEEGAKTAPTGKRIDDHFPKRKKARTEEDSKPSTSSDAEAGPSGSQQLQIPAQPASSLGADTMSAGGGGPLGDNNQGADGVGNASGDWHCDSTWMGDRVVTKSTRTWVLPSYNNHQYREIKSGSVDGSNANAYFGYSTPWGYFDFNRFHSHWSPRDWQRLINNYWGFRPRSLRVKIFNIQVKEVTVQDSTTTIANNLTSTVQVFTDDDYQLPYVVGNGTEGCLPAFPPQVFTLPQYGYATLNRDNTENPTERSSFFCLEYFPSKMLRTGNNFEFTYNFEEVPFHSSFAPSQNLFKLANPLVDQYLYRFVSTNNTGGVQFNKNLAGRYANTYKNWFPGPMGRTQGWNLGSGVNRASVSAFATTNRMELEGASYQVPPQPNGMTNNLQGSNTYALENTMIFGKQGSEKTNVDIEKVMITSESETQPVNRVAYNVGGQMATNNQSSTTAPATGTYNLQEIVPGSVWMERDVYLQGPIWAKIPETGAHFHPSPAMGGFGLKHPPPMMLIKNTPVPGNITSFSDVPVSSFITQYSTGQVTVEMEWELKKENSKRWNPEIQYTNNYNDPQFVDFAPDSTGEYRTTRPIGTRYLTRPL

SEQ ID NO: 1190 - protein, 519 aa, synthetic construct
  REGION 1..519: note = source = /note="Description of Artificial Sequence: Synthetic polypeptide"
DGVGSSSGNWHCDSTWLGDRVITTSTRTWALPTYNNHLYKQISNGTSGGATNDNTYFGYSTPWGYFDFNRFHCHFSPRDWQRLINNNWGFRPKRLSFKLFNIQVKEVTQNEGTKTIANNLTSTIQVFTDSEYQLPYVLGSAHQGCLPPFPADVFMIPQYGYLTLNNGSQAVGRSSFYCLEYFPSQMLRTGNNFQFTYTFEDVPFHSSYAHSQSLDRLMNPLIDQYLYYLSRTQTTGGTANTQTLGFSQGGPNTMANQAKNWLPGPCYRQQRVSTTTGQNNNSNFAWTAGTKYHLNGRNSLANPGIAMATHKDDEERFFPSNGILIFGKQNAARDNADYSDVMLTSEEEIKTTNPVATEEYGIVADNLQQQNTAPQIGTVNSQGALPGMVWQNRDVYLQGPIWAKIPHTDGNFHPSPLMGGFGLKHPPPQILIKNTPVPADPPTTFNQSKLNSFITQYSTGQVSVEIEWELQKENSKRWNPEIQYTSNYYKSTSVDFAVNTEGVYSEPRPIGTRYLTRNL

SEQ ID NO: 1191 - protein, 738 aa, synthetic construct
  REGION 1..738: note = source = /note="Description of Artificial Sequence: Synthetic polypeptide"
MAADGYLPDWLEDNLSEGIREWWALQPGAPKPKANQQHQDNARGLVLPGYKYLGPGNGLDKGEPVNAADAAALEHDKAYDQQLKAGDNPYLKYNHADAEFQERLKEDTSFGGNLGRAVFQAKKRLLEPLGLVEEAAKTAPGKKRPVEPSPQRSPDSSTGIGKKGQQPARKRLNFGQTGDSESVPDPQPLGEPPAAPSGVGPNTMAAGGGAPMADNNEGADGVGSSSGNWHCDSTWLGDRVITTSTRTWALPTYNNHLYKQISNGTSGGATNDNTYFGYSTPWGYFDFNRFHCHFSPRDWQRLINNNWGFRPKRLSFKLFNIQVKEVTQNEGTKTIANNLTSTIQVFTDSEYQLPYVLGSAHQGCLPPFPADVFMIPQYGYLTLNNGSQAVGRSSFYCLEYFPSQMLRTGNNFQFTYTFEDVPFHSSYAHSQSLDRLMNPLIDQYLYYLSRTQTTGGTANTQTLGFSQGGPNTMANQAKNWLPGPCYRQQRVSTTTGQNNNSNFAWTAGTKYHLNGRNSLANPGIAMATHKDDEERFFPSNGILIFGKQNAARDNADYSDVMLTSEEEIKTTNPVATEEYGIVADNLQQQNTAPQIGTVNSQGALPGMVWQNRDVYLQGPIWAKIPHTDGNFHPSPLMGGFGLKHPPPQILIKNTPVPADPPTTFNQSKLNSFITQYSTGQVSVEIEWELQKENSKRWNPEIQYTSNYYKSTSVDFAVNTEGVYSEPRPIGTRYLTRNL

SEQ ID NO: 1192 - protein, 725 aa, synthetic construct
  REGION 1..725: note = source = /note="Description of Artificial Sequence: Synthetic polypeptide"
MAADGYLPDWLEDNLSEGIREWWALQPGAPKPKANQQHQDNARGLVLPGYKYLGPGNGLDKGEPVNAADAAALEHDKAYDQQLKAGDNPYLKYNHADAEFQERLKEDTSFGGNLGRAVFQAKKRLLEPLGLVEEAAKTAPTGKRIDDHFPKRKKARTEEDSKPSTSSDAEAGPSGSQQLQIPAQPASSLGADTMSAGGGGPLGDNNQGADGVGNASGDWHCDSTWMGDRVVTKSTRTWVLPSYNNHQYREIKSGSVDGSNANAYFGYSTPWGYFDFNRFHSHWSPRDWQRLINNYWGFRPRSLRVKIFNIQVKEVTVQDSTTTIANNLTSTVQVFTDDDYQLPYVVGNGTEGCLPAFPPQVFTLPQYGYATLNRDNTENPTERSSFFCLEYFPSKMLRTGNNFEFTYNFEEVPFHSSFAPSQNLFKLANPLVDQYLYRFVSTNNTGGVQFNKNLAGRYANTYKNWFPGPMGRTQGWNLGSGVNRASVSAFATTNRMELEGASYQVPPQPNGMTNNLQGSNTYALENTMIFNSQPANPGTTATYLEGNMLITSESETQPVNRVAYNVGGQMATNNQSSTTAPATGTYNLQEIVPGSVWMERDVYLQGPIWAKIPETGAHFHPSPAMGGFGLKHPPPMMLIKNTPVPGNITSFSDVPVSSFITQYSTGQVTVEMEWELKKENSKRWNPEIQYTNNYNDPQFVDFAPDSTGEYRTTRPIGTRYLTRPL

SEQ ID NO: 1193 - protein, 736 aa, synthetic construct
  REGION 1..736: note = source = /note="Description of Artificial Sequence: Synthetic polypeptide"
MAADGYLPDWLEDNLSEGIREWWALKPGAPKPKANQQKQDDGRGLVLPGYKYLGPFNGLDKGEPVNAADAAALEHDKAYDQQLQAGDNPYLRYNHADAEFQERLQEDTSFGGNLGRAVFQAKKRVLEPLGLVEEGAKTAPGKKRPVDQSPQEPDSSSGVGKSGKQPARKRLNFGQTGDSESVPDPQPLGEPPAAPTSLGSNTMASGGGAPMADNNEGADGVGNSSGNWHCDSQWLGDRVITTSTRTWALPTYNNHLYKQISSQSGASNDNHYFGYSTPWGYFDFNRFHCHFSPRDWQRLINNNWGFRPKKLSFKLFNIQVKEVTQNDGTTTIANNLTSTVQVFTDSEYQLPYVLGSAHQGCLPPFPADVFMVPQYGYLTLNNGSQAVGRSSFYCLEYFPSQMLRTGNNFQFSYTFEDVPFHSSYAHSQSLDRLMNPLIDQYLYYLNRTQGTTSGTTNQSRLLFSQAGPQSMSLQARNWLPGPCYRQQRLSKTANDNNNSNFPWTAASKYHLNGRDSLVNPGPAMASHKDDEEKFFPMHGNLIFGKEGTTASNAELDNVMITDEEEIRTTNPVATEQYGTVANNLQSSNTAPTTRTVNDQGALPGMVWQDRDVYLQGPIWAKIPHTDGHFHPSPLMGGFGLKHPPPQIMIKNTPVPANPPTTFSPAKFASFITQYSTGQVSVEIEWELQKENSKRWNPEIQYTSNYNKSVNVDFTVDTNGVYSEPRPIGTRYLTRNL

SEQ ID NO: 1194 - protein, 735 aa, synthetic construct
  REGION 1..735: note = source = /note="Description of Artificial Sequence: Synthetic polypeptide"
MSFVDHPPDWLEEVGEGLREFLGLEAGPPKPKPNQQHQDQARGLVLPGYNYLGPGNGLDRGEPVNRADEVAREHDISYNEQLEAGDNPYLKYNHADAEFQEKLADDTSFGGNLGKAVFQAKKRVLEPFGLVEEGAKTAPGKKRPVDQSPQEPDSSSGVGKSGKQPARKRLNFGQTGDSESVPDPQPLGEPPAAPTSLGSNTMASGGGAPMADNNEGADGVGNSSGNWHCDSQWLGDRVITTSTRTWALPTYNNHLYKQISSQSGASNDNHYFGYSTPWGYFDFNRFHCHFSPRDWQRLINNNWGFRPKKLSFKLFNIQVKEVTQNDGTTTIANNLTSTVQVFTDSEYQLPYVLGSAHQGCLPPFPADVFMVPQYGYLTLNNGSQAVGRSSFYCLEYFPSQMLRTGNNFQFSYTFEDVPFHSSYAHSQSLDRLMNPLIDQYLYYLNRTQGTTSGTTNQSRLLFSQAGPQSMSLQARNWLPGPCYRQQRLSKTANDNNNSNFPWTAASKYHLNGRDSLVNPGPAMASHKDDEEKFFPMHGNLIFGKEGTTASNAELDNVMITDEEEIRTTNPVATEQYGTVANNLQSSNTAPTTRTVNDQGALPGMVWQDRDVYLQGPIWAKIPHTDGHFHPSPLMGGFGLKHPPPQIMIKNTPVPANPPTTFSPAKFASFITQYSTGQVSVEIEWELQKENSKRWNPEIQYTSNYNKSVNVDFTVDTNGVYSEPRPIGTRYLTRPL

SEQ ID NO: 1195 - protein, 736 aa, synthetic construct
  REGION 1..736: note = source = /note="Description of Artificial Sequence: Synthetic polypeptide"
MAADGYLPDWLEDNLSEGIREWWALKPGAPKPKANQQKQDDGRGLVLPGYKYLGPFNGLDKGEPVNAADAAALEHDKAYDQQLQAGDNPYLRYNHADAEFQERLQEDTSFGGNLGRAVFQAKKRVLEPLGLVEEGAKTAPGKKRPVEPSPQRSPDSSTGIGKKGQQPARKRLNFGQTGDSESVPDPQPLGEPPAAPSGVGPNTMAAGGGAPMADNNEGADGVGSSSGNWHCDSTWLGDRVITTSTRTWALPTYNNHLYKQISSQSGASNDNHYFGYSTPWGYFDFNRFHCHFSPRDWQRLINNNWGFRPKRLSFKLFNIQVKEVTQNEGTKTIANNLTSTIQVFTDSEYQLPYVLGSAHQGCLPPFPADVFMIPQYGYLTLNNGSQAVGRSSFYCLEYFPSQMLRTGNNFQFTYTFEDVPFHSSYAHSQSLDRLMNPLIDQYLYYLSRTQTTGGTANTQTLGFSQGGPNTMANQAKNWLPGPCYRQQRVSTTTGQNNNSNFAWTAGTKYHLNGRNSLANPGIAMATHKDDEERFFPSNGILIFGKQGTTASNAELDNVMITDEEEIKTTNPVATEEYGIVADNLQQQNTAPQIGTVNSQGALPGMVWQNRDVYLQGPIWAKIPHTDGNFHPSPLMGGFGLKHPPPQILIKNTPVPADPPTTFNQSKLNSFITQYSTGQVSVEIEWELQKENSKRWNPEIQYTSNYNKSVNVDFTVDTNGVYSEPRPIGTRYLTRNL

SEQ ID NO: 1196 - protein, 736 aa, synthetic construct
  REGION 1..736: note = source = /note="Description of Artificial Sequence: Synthetic polypeptide"
MAADGYLPDWLEDNLSEGIREWWALKPGAPKPKANQQKQDDGRGLVLPGYKYLGPFNGLDKGEPVNAADAAALEHDKAYDQQLQAGDNPYLRYNHADAEFQERLQEDTSFGGNLGRAVFQAKKRVLEPLGLVEEGAKTAPGKKRPVEPSPQRSPDSSTGIGKKGQQPARKRLNFGQTGDSESVPDPQPLGEPPAAPSGVGPNTMAAGGGAPMADNNEGADGVGSSSGNWHCDSTWLGDRVITTSTRTWALPTYNNHLYKQISSQSGASNDNHYFGYSTPWGYFDFNRFHCHFSPRDWQRLINNNWGFRPKRLSFKLFNIQVKEVTQNEGTKTIANNLTSTIQVFTDSEYQLPYVLGSAHQGCLPPFPADVFMIPQYGYLTLNNGSQAVGRSSFYCLEYFPSQMLRTGNNFQFTYTFEDVPFHSSYAHSQSLDRLMNPLIDQYLYYLSRTQTTGGTANTQTLGFSQGGPNTMANQAKNWLPGPCYRQQRVSTTTGQNNNSNFAWTAGTKYHLNGRNSLANPGIAMATHKDDEERFFPSNGILIFGKQNAARDNADYSDVMLTSEEEIKTTNPVATEEYGIVADNLQQQNTAPQIGTVNSQGALPGMVWQNRDVYLQGPIWAKIPHTDGNFHPSPLMGGFGLKHPPPQILIKNTPVPADPPTTFNQSKLNSFITQYSTGQVSVEIEWELQKENSKRWNPEIQYTSNYYKSTSVDFAVNTEGVYSEPRPIGTRYLTRNL

SEQ ID NO: 1197 - protein, 736 aa, synthetic construct
  REGION 1..736: note = source = /note="Description of Artificial Sequence: Synthetic polypeptide"
MAADGYLPDWLEDNLSEGIREWWDLKPGAPKPKANQQKQDDGRGLVLPGYKYLGPFNGLDKGEPVNAADAAALEHDKAYDQQLKAGDNPYLRYNHADAEFQERLQEDTSFGGNLGRAVFQAKKRVLEPLGLVEEGAKTAPGKKRPVEQSPQEPDSSSGIGKTGQQPAKKRLNFGQTGDTESVPDPQPLGEPPAAPSGLGPNTMASGGGAPMADNNEGADGVGNSSGNWHCDSTWLGDRVITTSTRTWALPTYNNHLYKQISNGTSGGSTNDNTYFGYSTPWGYFDFNRFHCHFSPRDWQRLINNNWGFRPKRLNFKLFNIQVKEVTTNEGTKTIANNLTSTVQVFTDSEYQLPYVLGSAHQGCLPPFPADVFMVPQYGYLTLNNGSQALGRSSFYCLEYFPSQMLRTGNNFQFSYTFEDVPFHSSYAHSQSLDRLMNPLIDQYLYYLVRTQTTGTGGTQTLAFSQAGPSSMASQARNWVPGPSYRQQRVSTTTNQNNNSNFAWTGAAKFKLNGRDSLMNPGVAMASHKDDEDRFFPSSGVLIFGKQGAGNDGVDYSQVLITDEEEIKATNPVATEEYGAVAINNQAANTQAQTGLVHNQGVIPGMVWQNRDVYLQGPIWAKIPHTDGNFHPSPLMGGFGLKHPPPQILIKNTPVPADPPLTFNQAKLNSFITQYSTGQVSVEIEWELQKENSKRWNPEIQYTSNYYKSTNVDFAVNTEGVYSEPRPIGTRYLTRNL

SEQ ID NO: 1198 - DNA, 3695 bp, synthetic construct
  misc_feature 1..3695: note = source = /note="Description of Artificial Sequence: Synthetic polynucleotide"
  source 1..3695: mol_type = other DNA
ctctttgcgcttgcgttttcccttgtccagatagcccagtagctgacattcatccggggtcagcaccgtttctgcggactggctttctacgtgaaaaggatctaggtgaagatcctttttgataatctcatgcctgacatttatattccccagaacatcaggttaatggcgtttttgatgtcattttcgcggtggctgagatcagccacttcttccccgataacggagaccggcacactggccatatcggtggtcatcatgcgccagctttcatccccgatatgcaccaccgggtaaagttcacgggagactttatctgacagcagacgtgcactggccagggggatcaccatccgtcgccccggcgtgtcaataatatcactctgtacatccacaaacagacgataacggctctctcttttataggtgtaaaccttaaactgccgtacgtataggctgcgcaactgttgggaagggcgatcggtgcgggcctcttcgctattacgccagctggcgaaagggggatgtgctgcaaggcgattaagttgggtaacgccagggttttcccagtcacgacgttgtaaaacgacggccagtgaattgtaatacgactcactatagggcgaattgaatttagcggccgcgaattcgcccttatgatatctggtgggaggagggcaagatgacggccaaggtcgtggagtccgccaaggccattctcggcggcagcaaagtgcgcgtggaccaaaagtgcaagtcgtccgcccagatcgatcccactcccgtcattgtcacctccaacaccaacatgtgcgccgtgattgacgggaacagcaccaccttcgagcaccagcagccgttgcaggaccggatgttcaaatttgaacttacccgccgtctggagcatgactttggcaaggtgacaaagcaggaagtcaaagagttcttccgctgggcgcaggatcacgtgaccgaggtggcgcatgagttccacgtcagaaagggtggagccaacaagagacccgcccccgatgacgctgataaaagcgagcccaagcgggcctgcccctcagtcgcagatccatcgacgtcagacgcggaaggagctccggtggactttgccgacaggtaccaaaacaaatgttctcgtcacgcgggcatgcttcagatgctgtttccctgcaagacatgcgagagaatgaatcagaatttcaacatttgcttcacgcacgggaccagggactgttcggagtgcttccccggcgtgtcagaatctcaaccggtcgtcagaaaaaggacgtatcggaaactctgtgccattcatcatctgctggggagggctcccgagattgcttgctcggcctgcgatctggtcaacgtggacctggatgactgtgtctctgagcaataaatgacttaaaccaggtatggctgccgatggttatcttccagattggctcgaggacaacctctctgagggcattcgcgagtggtgggacttgaaacctggagccccgaaacccaaagccaaccagcaaaagcaggacgacggccggggtctggtgcttcctggctacaagtacctcggacccttcaacggactcgacaagggggagcccgtcaacgcggcggacgcagcggccctcgagcacgacaaggcctacgaccagcagctcaaagcgggtgacaatccgtacctgcggtataaccacgccgacgccgagtttcaggagcgtctgcaagaagatacgtcttttgggggcaacctcgggcgagcagtcttccaggccaagaagcgggttctcgaacctctcggtctggttgaggaaggcgctaagacggctcctggaaagaagagaccggtagagcagtcaccccaagaaccagactcctcatcgggcatcggcaagacaggccagcagcccgctaaaaagagactcaattttggtcagactggcgacacagagtcagtccccgacccacaacctctcggagaacctccagcagccccctcaggtctgggacctaatacaatggcttcaggcggtggcgctccaatggcagacaataacgaaggcgccgacggagtgggtaattcctcgggaaattggcattgcgattccacatggctgggggacagagtcatcaccaccagcacccgaacctgggccctgcccacctacaacaaccacctctacaagcaaatctccaacggcacctcgggaggaagcaccaacgacaacacctactttggctacagcaccccctgggggtattttgacttcaacagattccactgccacttttcaccacgtgactggcagcgactcatcaacaacaattggggattccggcccaagagactcaacttcaagctcttcaacatccaggtcaaggaagtcacgacgaacgaaggcaccaagaccatcgccaataatctcaccagcaccgtgcaggtctttacggactcggagtaccagctaccgtacgtgctaggatcagctcaccagggatgtctgcctccgttcccggcggacgtcttcatggttcctcagtacggttatctaactctgaacaatggcagccaggccctgggacgttcctccttctactgcctggagtatttcccatcgcagatgctgagaaccggcaacaactttcagttcagctacaccttcgaggacgtgcctttccacagcagctacgcgcacagccaaagcctggacaggctgatgaatcccctcatcgaccagtacctgtattacctggtcagaacgcagacaaccgggactggagggacgcagactctggcattcagccaagcaggccctagctcaatggccagccaggctagaaactgggtgcccggaccgagctaccggcagcagcgcgtctccacgacaaccaaccagaacaacaacagcaactttgcctggacgggagctgccaaatttaaactgaacggccgagactctctaatgaaccccggcgtggccatggcttcacacaaggatgacgaggaccgcttcttcccttctagcggggtcctgattttcggcaagcaaggagccgggaatgatggagtggattacagccaagtgctgattacagatgaggaagaaatcaaggctaccaaccccgtggcaacagaggaatatggagcagtggccatcaacaaccaggccgctaatacgcaggcgcagaccggactcgtgcacaaccagggggtgattcccggcatggtgtggcagaacagagacgtgtacctgcagggtcccatctgggccaaaattcctcacacggacggcaactttcacccgtctcccctgatgggcggctttggactgaagcacccgcctcctcaaattctcatcaagaacacaccggttccagcggacccgccgcttaccttcaaccaggccaagctgaactctttcatcacgcagtacagcaccggacaggtcagcgtggaaatcgagtgggagctgcagaaagaaaacagcaaacgctggaatccagagattcagtacacttccaactactacaaatctacaaatgtggactttgctgtcaacacggaaggagtgtatagcgagcctcgccccattggcacccgttacctcacccgcaacctgtaattgcctgttaatcaataaaccggttaattcgtttcagtaaggaagaattcgtttaaa

SEQ ID NO: 1199 - protein, 736 aa, synthetic construct; identical to SEQ ID NO: 518
  REGION 1..736: note = source = /note="Description of Artificial Sequence: Synthetic polypeptide"

SEQ ID NO: 1200 - protein, 736 aa, synthetic construct
  REGION 1..736: note = source = /note="Description of Artificial Sequence: Synthetic polypeptide"
MAADGYLPDWLEDNLSEGIREWWDLKPGAPKPKANQQKQDDGRGLVLPGYKYLGPFNGLDKGEPVNAADAAALEHDKAYDQQLKAGDNPYLRYNHADAEFQERLQEDTSFGGNLGRAVFQAKKRVLEPLGLVEEGAKTAPGKKRPVEQSPQEPDSSSGIGKTGQQPAKKRLNFGQTGDTESVPDPQPLGEPPAAPSGLGPNTMASGGGAPMADNNEGADGVGNSSGNWHCDSTWLGDRVITTSTRTWALPTYNNHLYKQISNGTSGGSTNDNTYFGYSTPWGYFDFNRFHCHFSPRDWQRLINNNWGFRPKRLNFKLFNIQVKEVTTNEGTKTIANNLTSTVQVFTDSEYQLPYVLGSAHQGCLPPFPADVFMVPQYGYLTLNNGSQALGRSSFYCLEYFPSQMLRTGNNFQFSYTFEDVPFHSSYAHSQSLDRLMNPLIDQYLYYLVRTQTTGTGGTQTLAFSQAGPSNMASQARNWVPGPSYRQQRVSTTTNQNNNSNFAWTGAAKFKLNGRDSLMNPGVAMASHKDDEDRFFPSSGVLIFGKQGAGNDGVDYSQVLITDEEEIKATNPVATEEYGAVAINNQAANTQAQTGLVHNQGVIPGMVWQNRDVYLQGPIWAKIPHTDGNFHPSPLMGGFGLKHPPPQILIKNTPVPADPPLTFNQAKLNSFITQYSTGQVSVEIEWELQKENSKRWNPEIQYTSNYYKSTNVDFAVNTEGVYSEPRPIGTRYLTRNL

SEQ ID NO: 1201 - protein, 738 aa, synthetic construct; identical to SEQ ID NO: 895
  REGION 1..738: note = source = /note="Description of Artificial Sequence: Synthetic polypeptide"

SEQ ID NO: 1202 - protein, 736 aa, synthetic construct
  REGION 1..736: note = source = /note="Description of Artificial Sequence: Synthetic polypeptide"
MAADGYLPDWLEDNLSEGIREWWALQPGAPKPKANQQHQDNARGLVLPGYKYLGPGNGLDKGEPVNAADAAALEHDKAYDQQLKAGDNPYLKYNHADAEFQERLKEDTSFGGNLGRAVFQAKKRILEPLGLVEEAAKTAPGKKRPVDQSPQEPDSSSGVGKSGKQPARKRLNFGQTGDSESVPDPQPLGEPPAAPTSLGSNTMASGGGAPMADNNEGADGVGNSSGNWHCDSQWLGDRVITTSTRTWALPTYNNHLYKQISSQSGASNDNHYFGYSTPWGYFDFNRFHCHFSPRDWQRLINNNWGFRPKKLSFKLFNIQVKEVTQNDGTTTIANNLTSTVQVFTDSEYQLPYVLGSAHQGCLPPFPADVFMVPQYGYLTLNNGSQAVGRSSFYCLEYFPSQMLRTGNNFQFSYTFEDVPFHSSYAHSQSLDRLMNPLIDQYLYYLNRTQGTTSGTTNQSRLLFSQAGPQSMSLQARNWLPGPCYRQQRLSKTANDNNNSNFPWTAASKYHLNGRDSLVNPGPAMASHKDDEEKFFPMHGNLIFGKEGTTASNAELDNVMITDEEEIRTTNPVATEQYGTVANNLQSSNTAPTTRTVNDQGALPGMVWQDRDVYLQGPIWAKIPHTDGHFHPSPLMGGFGLKHPPPQIMIKNTPVPANPPTTFSPAKFASFITQYSTGQVSVEIEWELQKENSKRWNPEIQYTSNYNKSVNVDFTVDTNGVYSEPRPIGTRYLTRPL

SEQ ID NO: 1203 - protein, 736 aa, synthetic construct
  REGION 1..736: note = source = /note="Description of Artificial Sequence: Synthetic polypeptide"
MAADGYLPDWLEDNLSEGIREWWALQPGAPKPKANQQHQDNARGLVLPGYKYLGPGNGLDKGEPVNAADAAALEHDKAYDQQLKAGDNPYLKYNHADAEFQERLKEDTSFGGNLGRAVFQAKKRLLEPLGLVEEAAKTAPGKKRPVDQSPQEPDSSSGVGKSGKQPARKRLNFGQTGDSESVPDPQPLGEPPAAPTSLGSNTMASGGGAPMADNNEGADGVGNSSGNWHCDSQWLGDRVITTSTRTWALPTYNNHLYKQISSQSGASNDNHYFGYSTPWGYFDFNRFHCHFSPRDWQRLINNNWGFRPKKLSFKLFNIQVKEVTQNDGTTTIANNLTSTVQVFTDSEYQLPYVLGSAHQGCLPPFPADVFMVPQYGYLTLNNGSQAVGRSSFYCLEYFPSQMLRTGNNFQFSYTFEDVPFHSSYAHSQSLDRLMNPLIDQYLYYLNRTQGTTSGTTNQSRLLFSQAGPQSMSLQARNWLPGPCYRQQRLSKVANDNNNSNFPWTAASKYHLNGRDSLVNPGPAMASHKDDEEKFFPMHGNLIFGKEGTTASNAELDNVMITDEEEIRTTNPVATEQYGTVANNLQSSNTAPTTRTVNDQGALPGMVWQDRDVYLQGPIWAKIPHTDGHFHPSPLMGGFGLKHPPPQIMIKNTPVPANPPTTFVPAKFASFITQYSTGQVSVEIEWELQKENSKRWNPEIQYTSNYNKSVNVDFTVDTNGVYSEPRPIGTRYLTRPL

SEQ ID NO: 1204 - protein, 736 aa, synthetic construct; identical to SEQ ID NO: 912
  VARIANT 168: note = /replace="Arg" - can be Arg
  VARIANT 204: note = /replace="Ser" - can be Ser
  VARIANT 266: note = /replace="Gly" - can be Gly
  VARIANT 311: note = /replace="Lys" - can be Lys
  VARIANT 411: note = /replace="Gln" - can be Gln
  VARIANT 460: note = /replace="Glu" - can be Glu
  VARIANT 493: note = /replace="Thr" - can be Thr
  VARIANT 562: note = /replace="Asn" - can be Asn
  VARIANT 576: note = /replace="Glu" - can be Glu
  VARIANT 587: note = /replace="Ala" - can be Ala
  VARIANT 609: note = /replace="Asp
  REGION 1..736: note = SITE - /note="Variant residues given in the sequence have no preference with respect to those in the annotations for variant positions"
  REGION 1..736: note = source = /note="Description of Artificial Sequence: Synthetic polypeptide"

SEQ ID NO: 1205 - DNA, 2208 bp, synthetic construct; identical to SEQ ID NO: 913
  misc_difference 502..504: note = variation - /replace="aaa" - can be aaa
  misc_difference 610..612: note = variation - /replace="agc" - can be agc
  misc_difference 796..798: note = variation - /replace="ggc" - can be ggc
  misc_difference 931..933: note = variation - /replace="aag" - can be aag
  misc_difference 1231..1233: note = variation - /replace="cag" - can be cag
  misc_difference 1378..1380: note = variation - /replace="gag" - can be gag
  misc_difference 1477..1479: note = variation - /replace="acc" - can be acc
  misc_difference 1684..1686: note = variation - /replace="aac" - can be aac
  misc_difference 1726..1728: note = variation - /replace="gag" - can be gag
  misc_difference 1759..1761: note = variation - /replace="gcc" - can be gcc
  misc_difference 1825..1827: note = variation - /replace="gac" - can be gac
  misc_feature 1..2208: note = /note="Variant residues given in the sequence have no preference with respect to those in the annotations for variant positions"
  misc_feature 1..2208: note = source = /note="Description of Artificial Sequence: Synthetic polynucleotide"
  source 1..2208: mol_type = other DNA

SEQ ID NO: 1206 - protein, 737 aa, synthetic construct
  VARIANT 157: note = /replace="Ser" - can be Ser
  VARIANT 168: note = /replace="Arg" - can be Arg
  VARIANT 262: note = /replace="Ser" - can be Ser
  VARIANT 263: note = /replace="His" - can be His
  VARIANT 312: note = /replace="Lys" - can be Lys
  VARIANT 412: note = /replace="Gln" - can be Gln
  VARIANT 460: note = /replace="Gln" - can be Gln
  VARIANT 461: note = /replace="Glu" - can be Glu
  VARIANT 552: note = /replace="Ser" - can be Ser
  VARIANT 556: note = /replace="Tyr" - can be Tyr
  VARIANT 557: note = /replace="Ser" - can be Ser
  VARIANT 563: note = /replace="Asn" - can be Asn
  VARIANT 580: note = /replace="Ile" - can be Ile
  VARIANT 588: note = /replace="Ser" - can be Ser
  VARIANT 664: note = /replace="Thr
  REGION 1..737: note = SITE - /note="Variant residues given in the sequence have no preference with respect to those in the annotations for variant positions"
  REGION 1..737: note = source = /note="Description of Artificial Sequence: Synthetic polypeptide"
MAADGYLPDWLEDNLSEGIREWWDLKPGAPKPKANQQKQDDGRGLVLPGYKYLGPFNGLDKGEPVNAADAAALEHDKAYDQQLKAGDNPYLRYNHADAEFQERLQEDTSFGGNLGRAVFQAKKRVLEPLGLVEEGAKTAPGKKRPVEQSPQEPDSSTGIGKKGQQPAKKRLNFGQTGDSESVPDPQPLGEPPAAPSGVGSNTMAAGGGAPMADNNEGADGVGNASGNWHCDSTWLGDRVITTSTRTWALPTYNNHLYKQISNSQSGGSTNDNTYFGYSTPWGYFDFNRFHCHFSPRDWQRLINNNWGFRPKRLNFKLFNIQVKEVTTNDGTTTIANNLTSTVQVFTDSEYQLPYVLGSAHQGCLPPFPADVFMIPQYGYLTLNNGSQAVGRSSFYCLEYFPSQMLRTGNNFEFSYTFEDVPFHSSYAHSQSLDRLMNPLIDQYLYYLSRTQTTGGTAGNRTLQFSQAGPSSMANQAKNWLPGPCYRQQRVSKTTNQNNNSNFAWTGATKYHLNGRDSLVNPGVAMATHKDDEDRFFPSSGVLIFGKQGAGNDNVDLDNVMITSEEEIKTTNPVATEEYGVVATNLQSNNTAPQTGTVNSQGALPGMVWQNRDVYLQGPIWAKIPHTDGNFHPSPLMGGFGLKHPPPQILIKNTPVPANPPTTFSPAKFASFITQYSTGQVSVEIEWELQKENSKRWNPEIQYTSNYNKSTNVDFAVDTEGVYSEPRPIGTRYLTRNL

SEQ ID NO: 1207 - DNA, 2211 bp, synthetic construct; identical to SEQ ID NO: 915
  misc_difference 469..471: note = variation - /replace="agc" - can be agc
  misc_difference 502..504: note = variation - /replace="aag" - can be aag
  misc_difference 784..786: note = variation - /replace="agt" - can be agt
  misc_difference 787..789: note = variation - /replace="cac" - can be cac
  misc_difference 934..936: note = variation - /replace="aag" - can be aag
  misc_difference 1234..1236: note = variation - /replace="cag" - can be cag
  misc_difference 1378..1380: note = variation - /replace="cag" - can be cag
  misc_difference 1381..1383: note = variation - /replace="gag" - can be gag
  misc_difference 1654..1656: note = variation - /replace="agc" - can be agc
  misc_difference 1666..1668: note = variation - /replace="tac" - can be tac
  misc_difference 1669..1671: note = variation - /replace="agc" - can be agc
  misc_difference 1687..1689: note = variation - /replace="aac" - can be aac
  misc_difference 1738..1740: note = variation - /replace="atc" - can be atc
  misc_difference 1762..1764: note = variation - /replace="agc" - can be agc
  misc_difference 1990..1992: note = variation - /replace="acc" - can be acc
  misc_feature 1..2211: note = /note="Variant residues given in the sequence have no preference with respect to those in the annotations for variant positions"
  misc_feature 1..2211: note = source = /note="Description of Artificial Sequence: Synthetic polynucleotide"
  source 1..2211: mol_type = other DNA

SEQ ID NO: 1208 - protein, 738 aa, synthetic construct; identical to SEQ ID NO: 916
  VARIANT 158: note = /replace="Ser" - can be Ser
  VARIANT 169: note = /replace="Arg" - can be Arg
  VARIANT 564: note = /replace="Asn
  REGION 1..738: note = SITE - /note="Variant residues given in the sequence have no preference with respect to those in the annotations for variant positions"
  REGION 1..738: note = source = /note="Description of Artificial Sequence: Synthetic polypeptide"

SEQ ID NO: 1209 - DNA, 2214 bp, synthetic construct; identical to SEQ ID NO: 917
  misc_difference 472..474: note = variation - /replace="agc" - can be agc
  misc_difference 505..507: note = variation - /replace="aga" - can be aga
  misc_difference 1690..1692: note = variation - /replace="aac" - can be aac
  misc_feature 1..2214: note = /note="Variant residues given in the sequence have no preference with respect to those in the annotations for variant positions"
  misc_feature 1..2214: note = source = /note="Description of Artificial Sequence: Synthetic polynucleotide"
  source 1..2214: mol_type = other DNA

SEQ ID NO: 1210 - protein, 738 aa, synthetic construct; identical to SEQ ID NO: 918
  VARIANT 158: note = /replace="Ser" - can be Ser
  VARIANT 169: note = /replace="Lys" - can be Lys
  VARIANT 315: note = /replace="Ser" - can be Ser
  VARIANT 413: note = /replace="Glu" - can be Glu
  VARIANT 472: note = /replace="Thr" or "Ser" - can be Thr" or "Ser
  VARIANT 534: note = /replace="Glu" - can be Glu
  VARIANT 542: note = /replace="Val" - can be Val
  VARIANT 595: note = /replace="Val
  REGION 1..738: note = SITE - /note="Variant residues given in the sequence have no preference with respect to those in the annotations for variant positions"
  REGION 1..738: note = source = /note="Description of Artificial Sequence: Synthetic polypeptide"

SEQ ID NO: 1211 - DNA, 2214 bp, synthetic construct
  misc_difference 472..474: note = variation - /replace="agc" - can be agc
  misc_difference 505..507: note = variation - /replace="aag" - can be aag
  misc_difference 943..945: note = variation - /replace="agc" - can be agc
  misc_difference 1237..1239: note = variation - /replace="gaa" - can be gaa
  misc_difference 1414..1416: note = variation - /replace="acc" or "agc" - can be acc" or "agc
  misc_difference 1600..1602: note = variation - /replace="gag" - can be gag
  misc_difference 1624..1626: note = variation - /replace="gtc" - can be gtc
  misc_difference 1783..1785: note = variation - /replace="gta" - can be gta
  misc_feature 1..2214: note = /note="Variant residues given in the sequence have no preference with respect to those in the annotations for variant positions"
  misc_feature 1..2214: note = source = /note="Description of Artificial Sequence: Synthetic polynucleotide"
  source 1..2214: mol_type = other DNA
atggctgccgatggttatcttccagattggctcgaggacaacctctctgagggcattcgcgagtggtgggacctgaaacctggagccccgaaacccaaagccaaccagcaaaagcaggacgacggccggggtctggtgcttcctggctacaagtacctcggacccttcaacggactcgacaagggggagcccgtcaacgcggcggacgcagcggccctcgagcacgacaaggcctacgaccagcagctcaaagcgggtgacaatccgtacctgcggtataatcacgccgacgccgagtttcaggagcgtctgcaagaagatacgtcttttgggggcaacctcgggcgagcagtcttccaggccaagaagcgggttctcgaacctctcggtctggttgaggaaggcgctaagacggctcctggaaagaagagaccggtagagcagtcaccacagcgtgagcccgactcctccacgggcatcggcaagaaaggccagcagcccgccagaaagagactcaatttcggtcagactggcgactcagagtcagtccccgaccctcaacctctcggagaacctccagcagcgccctctggtgtgggatctaatacaatggctgcaggcggtggcgcaccaatggcagacaataacgaaggtgccgacggagtgggtagttcctcgggaaattggcattgcgattccacatggctgggcgacagagtcatcaccaccagcacccgaacctgggccctgcccacctacaacaaccacctctacaagcaaatctccaacgggacctcgggaggcagcaccaacgacaacacctactttggctacagcaccccctgggggtattttgactttaacagattccactgccacttctcaccacgtgactggcagcgactcatcaacaacaactggggattccggcccaagagactcaacttcaagctcttcaacatccaggtcaaagaggtcacgcagaatgaaggcaccaagaccatcgccaataacctcaccagcaccatccaggtgtttacggactcggaataccagctgccgtacgtcctcggctctgcccaccagggctgcctgcctccgttcccggcggacgtcttcatgattcctcagtacggctacctgactctcaacaacggtagtcaggccgtgggacgttcctccttctactgcctggagtacttcccctctcagatgctgagaacgggcaacaactttcaattcagctacactttcgaggacgtgcctttccacagcagctacgcgcacagccagagtttggacaggctgatgaatcctctcatcgaccagtacctgtactacctgtcaagaacccagactacgggaggcacagcgggaacccagacgttgcagttttctcaggccgggcctagcaacatggcgaatcaggccaaaaactggctgcctggaccctgctacagacagcagcgcgtctccacgacaacgtcgcaaaacaacaacagcaactttgcctggactggtgccaccaagtatcatctgaacggcagagactctctggtgaatccgggcgtcgccatggcaacccacaaggacgacgaggaccgcttcttcccatccagcggcatcctcatatttggcaagcagggagctggaaaagacaacgtggactatagcaacgtgatgctaaccagcgaggaagaaatcaagaccaccaaccccgtggccacagaagagtatggcgtggtggctgataacctacagcagcaaaacaccgctcctcaaatagggaccgtcaacagccagggagccttacctggcatggtctggcagaaccgggacgtgtacctgcagggtcctatttgggccaagattcctcacacagatggcaactttcacccgtctcctttaatgggcggctttggacttaaacatccgcctcctcagatcctcatcaaaaacactcctgttcctgcggatcctccaacaacgttcaaccaggccaagctgaattctttcatcacgcagtacagcaccggacaagtcagcgtggagatcgagtgggagctgcagaaggagaacagcaagcgctggaacccagagattcagtatacttccaactactacaaatctacaaatgtggactttgctgttaatactgagggtgtttactctgagcctcgccccattggcactcgttacctcacccgtaatctg

SEQ ID NO: 1212 - protein, 738 aa, synthetic construct; identical to SEQ ID NO: 920
  VARIANT 169: note = /replace="Lys" - can be Lys
  VARIANT 315: note = /replace="Ser" - can be Ser
  VARIANT 534: note = /replace="Glu" - can be Glu
  VARIANT 542: note = /replace="Val
  REGION 1..738: note = SITE - /note="Variant residues given in the sequence have no preference with respect to those in the annotations for variant positions"
  REGION 1..738: note = source = /note="Description of Artificial Sequence: Synthetic polypeptide"

SEQ ID NO: 1213 - DNA, 2214 bp, synthetic construct; identical to SEQ ID NO: 921
  misc_difference 505..507: note = variation - /replace="aaa" - can be aaa
  misc_difference 943..945: note = variation - /replace="agc" - can be agc
  misc_difference 1600..1602: note = variation - /replace="gag" - can be gag
  misc_difference 1624..1626: note = variation - /replace="gtc" - can be gtc
  misc_feature 1..2214: note = /note="Variant residues given in the sequence have no preference with respect to those in the annotations for variant positions"
  misc_feature 1..2214: note = source = /note="Description of Artificial Sequence: Synthetic polynucleotide"
  source 1..2214: mol_type = other DNA

SEQ ID NO: 1214 - protein, 738 aa, synthetic construct; identical to SEQ ID NO: 922
  VARIANT 471: note = /replace="Asn
  REGION 1..738: note = SITE - /note="Variant residues given in the sequence have no preference with respect to those in the annotations for variant positions"
  REGION 1..738: note = source = /note="Description of Artificial Sequence: Synthetic polypeptide"

SEQ ID NO: 1215 - DNA, 2214 bp, synthetic construct; identical to SEQ ID NO: 923
  misc_difference 1411..1413: note = variation - /replace="aat" - can be aat
  misc_feature 1..2214: note = /note="Variant residues given in the sequence have no preference with respect to those in the annotations for variant positions"
  misc_feature 1..2214: note = source = /note="Description of Artificial Sequence: Synthetic polynucleotide"
  source 1..2214: mol_type = other DNA

SEQ ID NO: 1216 - protein, 737 aa, synthetic construct; identical to SEQ ID NO: 924
  VARIANT 148: note = /replace="Gln" - can be Gln
  VARIANT 169: note = /replace="Arg" - can be Arg
  VARIANT 314: note = /replace="Asn" - can be Asn
  VARIANT 466: note = /replace="His" - can be His
  VARIANT 563: note = /replace="Ser" - can be Ser
  VARIANT 580: note = /replace="Ile" - can be Ile
  VARIANT 588: note = /replace="Ser
  REGION 1..737: note = SITE - /note="Variant residues given in the sequence have no preference with respect to those in the annotations for variant positions"
  REGION 1..737: note = source = /note="Description of Artificial Sequence: Synthetic polypeptide"

SEQ ID NO: 1217 - DNA, 2211 bp, synthetic construct; identical to SEQ ID NO: 925
  misc_difference 442..444: note = variation - /replace="cag" - can be cag
  misc_difference 505..507: note = variation - /replace="aga" - can be aga
  misc_difference 940..942: note = variation - /replace="aac" - can be aac
  misc_difference 1396..1398: note = variation - /replace="cac" - can be cac
  misc_difference 1687..1689: note = variation - /replace="agt" - can be agt
  misc_difference 1738..1740: note = variation - /replace="ata" - can be ata
  misc_difference 1762..1764: note = variation - /replace="tct" - can be tct
  misc_feature 1..2211: note = /note="Variant residues given in the sequence have no preference with respect to those in the annotations for variant positions"
  misc_feature 1..2211: note = source = /note="Description of Artificial Sequence: Synthetic polynucleotide"
  source 1..2211: mol_type = other DNA

SEQ ID NO: 1218 - protein, 735 aa, synthetic construct; identical to SEQ ID NO: 926
  VARIANT 162: note = /replace="Thr" - can be Thr
  VARIANT 168: note = /replace="Arg" - can be Arg
  VARIANT 224: note = /replace="Ser" - can be Ser
  VARIANT 310: note = /replace="Lys" - can be Lys
  VARIANT 410: note = /replace="Gln" - can be Gln
  VARIANT 446: note = /replace="Asn" - can be Asn
  VARIANT 461: note = /replace="Leu" - can be Leu
  VARIANT 471: note = /replace="Ser" - can be Ser
  VARIANT 708: note = /replace="Thr
  REGION 1..735: note = SITE - /note="Variant residues given in the sequence have no preference with respect to those in the annotations for variant positions"
  REGION 1..735: note = source = /note="Description of Artificial Sequence: Synthetic polypeptide"

SEQ ID NO: 1219 - DNA, 2205 bp, synthetic construct; identical to SEQ ID NO: 927
  misc_difference 484..486: note = variation - /replace="aca" - can be aca
  misc_difference 502..504: note = variation - /replace="aga" - can be aga
  misc_difference 670..672: note = variation - /replace="tcc" - can be tcc
  misc_difference 928..930: note = variation - /replace="aaa" - can be aaa
  misc_difference 1228..1230: note = variation - /replace="cag" - can be cag
  misc_difference 1336..1338: note = variation - /replace="aac" - can be aac
  misc_difference 1381..1383: note = variation - /replace="ctg" - can be ctg
  misc_difference 1411..1413: note = variation - /replace="tct" - can be tct
  misc_difference 2122..2124: note = variation - /replace="acc" - can be acc
  misc_feature 1..2205: note = /note="Variant residues given in the sequence have no preference with respect to those in the annotations for variant positions"
  misc_feature 1..2205: note = source = /note="Description of Artificial Sequence: Synthetic polynucleotide"
  source 1..2205: mol_type = other DNA

SEQ ID NO: 1220 - protein, 735 aa, synthetic construct; identical to SEQ ID NO: 928
  VARIANT 42: note = /replace="Ser" - can be Ser
  VARIANT 168: note = /replace="Lys" - can be Lys
  VARIANT 310: note = /replace="Arg" - can be Arg
  VARIANT 410: note = /replace="Gln" - can be Gln
  VARIANT 446: note = /replace="Arg" - can be Arg
  VARIANT 461: note = /replace="Leu" - can be Leu
  VARIANT 471: note = /replace="Ser" - can be Ser
  VARIANT 475: note = /replace="Arg" - can be Arg
  VARIANT 504: note = /replace="Ala" - can be Ala
  VARIANT 539: note = /replace="Asn
  REGION 1..735: note = SITE - /note="Variant residues given in the sequence have no preference with respect to those in the annotations for variant positions"
  REGION 1..735: note = source = /note="Description of Artificial Sequence: Synthetic polypeptide"

SEQ ID NO: 1221 - DNA, 2205 bp, synthetic construct; identical to SEQ ID NO: 929
  misc_difference 124..126: note = variation - /replace="agt" - can be agt
  misc_difference 502..504: note = variation - /replace="aaa" - can be aaa
  misc_difference 928..930: note = variation - /replace="aga" - can be aga
  misc_difference 1228..1230: note = variation - /replace="cag" - can be cag
  misc_difference 1336..1338: note = variation - /replace="aga" - can be aga
  misc_difference 1381..1383: note = variation - /replace="ctc" - can be ctc
  misc_difference 1411..1413: note = variation - /replace="tct" - can be tct
  misc_difference 1423..1425: note = variation - /replace="aga" - can be aga
  misc_difference 1510..1512: note = variation - /replace="gcg" - can be gcg
  misc_difference 1615..1617: note = variation - /replace="gac" - can be gac
  misc_feature 1..2205: note = /note="Variant residues given in the sequence have no preference with respect to those in the annotations for variant positions"
  misc_feature 1..2205: note = source = /note="Description of Artificial Sequence: Synthetic polynucleotide"
  source 1..2205: mol_type = other DNA

SEQ ID NO: 1222 - protein, 736 aa, synthetic construct; identical to SEQ ID NO: 930
  REGION 1..736: note = source = /note="Description of Artificial Sequence: Synthetic polypeptide"

SEQ ID NO: 1223 - protein, 736 aa, synthetic construct; identical to SEQ ID NO: 931
  REGION 1..736: note = source = /note="Description of Artificial Sequence: Synthetic polypeptide"

SEQ ID NO: 1224 - protein, 736 aa, synthetic construct; identical to SEQ ID NO: 932
  REGION 1..736: note = source = /note="Description of Artificial Sequence: Synthetic polypeptide"

SEQ ID NO: 1225 - protein, 736 aa, synthetic construct; identical to SEQ ID NO: 933
  REGION 1..736: note = source = /note="Description of Artificial Sequence: Synthetic polypeptide"

SEQ ID NO: 1226 - protein, 736 aa, synthetic construct; identical to SEQ ID NO: 934
  REGION 1..736: note = source = /note="Description of Artificial Sequence: Synthetic polypeptide"

SEQ ID NO: 1227 - protein, 736 aa, synthetic construct; identical to SEQ ID NO: 935
  REGION 1..736: note = source = /note="Description of Artificial Sequence: Synthetic polypeptide"

SEQ ID NO: 1228 - protein, 736 aa, synthetic construct; identical to SEQ ID NO: 936
  REGION 1..736: note = source = /note="Description of Artificial Sequence: Synthetic polypeptide"

SEQ ID NO: 1229 - protein, 736 aa, synthetic construct; identical to SEQ ID NO: 937
  REGION 1..736: note = source = /note="Description of Artificial Sequence: Synthetic polypeptide"

SEQ ID NO: 1230 - DNA, 2211 bp, synthetic construct; identical to SEQ ID NO: 938
  misc_feature 1..2211: note = source = /note="Description of Artificial Sequence: Synthetic polynucleotide"
  source 1..2211: mol_type = other DNA

SEQ ID NO: 1231 - protein, 738 aa, synthetic construct; identical to SEQ ID NO: 18
  REGION 1..738: note = source = /note="Description of Artificial Sequence: Synthetic polypeptide"

SEQ ID NO: 1232 - protein, 738 aa, synthetic construct; identical to SEQ ID NO: 18
  REGION 1..738: note = source = /note="Description of Artificial Sequence: Synthetic polypeptide"

SEQ ID NO: 1233 - protein, 738 aa, synthetic construct
  VARIANT 157: note = /replace="Thr" - can be Thr
  VARIANT 169: note = /replace="Arg" - can be Arg
  VARIANT 457: note = /replace="Gly" - can be Gly
  VARIANT 463: note = /replace="Ala" - can be Ala
  VARIANT 508: note = /replace="Ala" - can be Ala
  VARIANT 510: note = /replace="Phe" - can be Phe
  VARIANT 511: note = /replace="Lys" - can be Lys
  VARIANT 558: note = /replace="Asn" - can be Asn
  VARIANT 585: note = /replace="His" - can be His
  VARIANT 587: note = /replace="Ala
  REGION 1..738: note = SITE - /note="Variant residues given in the sequence have no preference with respect to those in the annotations for variant positions"
  REGION 1..738: note = source = /note="Description of Artificial Sequence: Synthetic polypeptide"
MAADGYLPDWLEDNLSEGIREWWDLKPGAPKPKANQQKQDDGRGLVLPGYKYLGPFNGLDKGEPVNAADAAALEHDKAYDQQLKAGDNPYLRYNHADAEFQERLQEDTSFGGNLGRAVFQAKKRVLEPLGLVEEGAKTAPGKKRPVEQSPQEPDSSSLGIGKTGQQPAKKRLNFGQTGDSESVPDPQPLGEPPAAPSGVGSNTMASGGGAPMADNNEGADGVGNSSGNWHCDSTWLGDRVITTSTRTWALPTYNNHLYKQISNGTSGGSTNDNTYFGYSTPWGYFDFNRFHCHFSPRDWQRLINNNWGFRPKRLNFKLFNIQVKEVTTNEGTKTIANNLTSTVQVFTDSEYQLPYVLGSAHQGCLPPFPADVFMIPQYGYLTLNNGSQAVGRSSFYCLEYFPSQMLRTGNNFQFSYTFEDVPFHSSYAHSQSLDRLMNPLIDQYLYYLSRTQTTGTAGTQTLQFSQAGPSSMANQARNWVPGPCYRQQRVSTTTNQNNNSNFAWTGATKYHLNGRDSLMNPGVAMASHKDDEDRFFPSSGVLIFGKQGAGNDNVDYSQVMITNEEEIKTTNPVATEEYGAVATNNQSLANTQAQTGLVHNQGVLPGMVWQNRDVYLQGPIWAKIPHTDGNFHPSPLMGGFGLKHPPPQILIKNTPVPADPPTTFNQAKLNSFITQYSTGQVSVEIEWELQKENSKRWNPEIQYTSNYYKSTNVDFAVNTEGVYSEPRPIGTRYLTRNL

SEQ ID NO: 1234 - DNA, 2211 bp, synthetic construct
  misc_difference 469..471: note = variation - /replace="acg" - can be acg
  misc_difference 502..504: note = variation - /replace="aga" - can be aga
  misc_difference 1366..1368: note = variation - /replace="gga" - can be gga
  misc_difference 1384..1386: note = variation - /replace="gca" - can be gca
  misc_difference 1519..1521: note = variation - /replace="gcc" - can be gcc
  misc_difference 1525..1527: note = variation - /replace="ttt" - can be ttt
  misc_difference 1528..1530: note = variation - /replace="aaa" - can be aaa
  misc_difference 1669..1671: note = variation - /replace="aac" - can be aac
  misc_difference 1750..1752: note = variation - /replace="cac" - can be cac
  misc_difference 1756..1758: note = variation - /replace="gcc" - can be gcc
  misc_feature 1..2211: note = /note="Variant residues given in the sequence have no preference with respect to those in the annotations for variant positions"
  misc_feature 1..2211: note = source = /note="Description of Artificial Sequence: Synthetic polynucleotide"
  source 1..2211: mol_type = other DNA
atggctgccgatggttatcttccagattggctcgaggacaacctctctgagggcattcgcgagtggtgggacttgaaacctggagccccgaaacccaaagccaaccagcaaaagcaggacgacggccggggtctggtgcttcctggctacaagtacctcggacccttcaacggactcgacaagggggagcccgtcaacgcggcggacgcagcggccctcgagcacgacaaagcctacgaccagcagctcaaagcgggtgacaatccgtacctgcggtataatcacgccgacgccgagtttcaggagcgtctgcaagaagatacgtcttttgggggcaacctcgggcgagcagtcttccaggccaagaagcgggttctcgaacctctcggtctggttgaggaaggcgctaagacggctcctggaaagaagaggccggtagagcagtcgccacaagagccagactcctcctcgggcatcggcaagacaggccagcagcccgctaaaaagagactcaattttggtcagactggcgactcagagtcagtccccgacccacaacctctcggagaacctccagcagccccctcaggtgtgggatctaatacaatggcttcaggcggtggcgctccaatggcagacaataacgaaggcgccgacggagtgggtaattcctcgggaaattggcattgcgattccacatggctgggggacagagtcatcaccaccagcacccgaacctgggccctgcccacctacaacaaccacctctacaagcaaatctccaacggcacctcgggaggaagcaccaacgacaacacctattttggctacagcaccccctgggggtattttgacttcaacagattccactgtcacttttcaccacgtgactggcaacgactcatcaacaacaattggggattccggcccaaaagactcaacttcaagctgttcaacatccaggtcaaggaagtcacgacgaacgaaggcaccaagaccatcgccaataatctcaccagcaccgtgcaggtctttacggactcggagtaccagttaccgtacgtgctaggatccgctcaccagggatgtctgcctccgttcccggcggacgtcttcatgattcctcagtacggctatttaactttaaacaatggaagccaagccgtgggacgttcctccttctactgtctggagtatttcccatcgcagatgctgagaaccggcaacaactttcagttcagctacaccttcgaggacgtgcctttccacagcagctacgcgcacagccagagcctggacaggctgatgaatcccctcatcgaccagtacctgtactacctgtccagaacgcaaacgactggaactgcagggacgcagactctgcaattcagccaagcgggtcctagctcaatggccaaccaggctagaaattgggtgcccggaccttgctaccggcagcagcgcgtctccacgacaaccaaccagaacaacaacagcaactttgcctggacgggagctaccaagtatcacctgaacggccgagactctctaatgaatccgggcgtggcaatggcttcccacaaggatgacgaggaccgcttcttcccttcgagcggggtcctgatttttggcaagcaaggagccgggaacgataatgtggattacagccaagtgatgattacaaatgaggaagaaatcaagactaccaaccccgtggccacagaagaatatggagcagtggccaccaacaaccagtccgccaatacgcaggcgcagaccggactcgtgcacaaccagggggtgcttcccggcatggtgtggcagaatagagacgtgtacctgcagggtcccatctgggccaaaattcctcacacggacggcaactttcacccgtctcccctgatgggcggctttggactgaagcacccgcctcctcaaattctcatcaagaacacaccggttccagcggacccgccgactaccttcaaccaggccaagctgaactctttcatcacgcagtacagcaccggacaggtcagcgtggaaatcgagtgggagctgcagaaagaaaacagcaaacgctggaatccagagattcaatacacttccaactactacaaatctacaaatgtggactttgctgtcaacacggagggggtttatagcgagcctcgccccattggcacccgttacctcacccgcaacctgtaa

SEQ ID NO: 1235 - protein, 733 aa, synthetic construct; identical to SEQ ID NO: 434
  REGION 1..733: note = source = /note="Description of Artificial Sequence: Synthetic polypeptide"

SEQ ID NO: 1236 - DNA, 4472 bp, synthetic construct
  misc_feature 1..4472: note = source = /note="Description of Artificial Sequence: Synthetic polynucleotide"
  source 1..4472: mol_type = other DNA
ctccatcactaggggtaaccgcgaagcgcctcccacgctgccgcgtcagcgctgacgtaaattacgtcataggggagtggtcctgtattagctgtcacgtgagtgcttttgcgacattttgcgacaccacgtggccattcatggtatatatggccgagtgagcgagcaggatctccattttgaccgcgaaatttgaacgagcagcagccatgccgggcttctacgagatcgtgcttaaggtgccgagcgacctggacgagcacctgccgggcatttctgactcgtttgtgaactgggtggcagagaaggaatgggagctgcccccggattctgacatggatcggaatctgattgagcaggcacccctgaccgtggccgagaagctacagcgcgacttcctggtccaatggcgccgcgtgagtaaggccccggaggccctcttctttgttcagttcgagaagggcgagtcctacttccacctccatattctggtagagaccacgggggtcaaatccatggtgctgggccgcttcctgagtcagattcgggacaagctggtgcagaccatctaccgcgggatcgagccgaccctgcccaactggttcgcggtgacaaagacgcgtaatggcgccggaggggggaacaaggtggtggacgagtgctacatccccaactacctgctgcccaagactcagcccgagctgcagtgggcgtggactaacatggaggagtatataagcgcgtgcttgaacctggccgagcgcaaacggctcgtggcgcagcacctgacccacgtcagccagacccaggagcagaacaaggagaatctgaacccgaattctgacgcgcctgtcatccggtcaaaaacctccgcgcgctacatggagctggtcgggtggctggtggaccggggcatcacctccgagaagcagtggatccaggaggaccaggcctcgtacatctccttcaacgccgcctccaactcgcggtctcagatcaaggccgcgctggacaatgccggcaagatcatggcgctgaccaaatccgcgcccgactacctggtaggccccgctctgcccgcggacattaaatccaaccgcatctaccgcatcctggagctgaatggctacgaccctgcctacgccggttccgtctttctcggctgggcccagaaaaagtttggcaaaaggaacaccatctggctgtttgggccggccaccacgggcaagaccaacatcgcggaagccatcgcccacgccgtgcccttctacggctgcgtcaactggaccaatgagaactttcccttcaacgattgcgtcgacaagatggtgatctggtgggaggagggcaagatgacggccaaggtcgtggagtccgccaaggccattctcggcggcagcaaggtgcgcgtggaccaaaagtgcaagtcgtccgcccagatcgatcccacccccgtgatcgtcacctccaacaccaacatgtgcgccgtgattgacgggaacagcaccaccttcgagcaccagcagccgttgcaggaccggatgttcaaatttgaacttacccgccgtctggagcacgactttggcaaggtgacaaagcaggaagtcaaagagttcttccgctgggcgcaggatcacgtgaccgaggtggcgcatgagttctacgtcagaaagggtggagctaacaaaagacccgcccccgatgacgcggatataagcgagcccaagcgggcctgcccctcagtcgcggatccatcgacgtcagacgcggaaggagctccggtggactttgccgacaggtaccaaaacaaatgttctcgtcacgcgggcatgcttcagatgctgtttccctgcaaaacatgcgagagaatgaatcagaatttcaacatttgcttcacgcacgggaccagagactgttcagaatgtttccctggcgtgtcagaatctcaaccggtcgtcagaaaaaagacgtatcggaaactctgtgcgattcatcatctgctggggcgggcacccgagattgcttgctcggcctgcgacctggtcaacgtggacctggatgactgtgtttctgagcaataaatgacttaaaccaggtatggctgccgatggttatcttccagattggctcgaggacaacctctctgagggcattcgcgagtggtgggacctgaaacctggagccccgaaacccaaagccaaccagcaaaagcaggacaacggccggggtctggtgcttcctggctacaagtacctcggacccttcaacggactcgacaagggggagcccgtcaacgcggcggacgcagcggccctcgagcacgacaaggcctacgaccagcagctccaagcgggtgacaatccgtacctgcggtataatcacgccgacgccgagtttcaggagcgtctgcaagaagatacgtcttttgggggcaacctcgggcgcgcagtcttccaggccaaaaagcgggttctcgaacctctgggcctggttgaatcgccggttaagacggctcctggaaagaagagaccggtagagccatcaccccagcgctctccagactcctctacgggcatcggcaagaaaggccagcagcccgcaaaaaagagactcaattttgggcagactggcgactcagagtcagtccccgaccctcaaccaatcggagaaccaccagcaggcccctctggtctgggatctggtacaatggctgcaggcggtggcgctccaatggcagacaataacgaaggcgccgacggagtgggtagttcctcaggaaattggcattgcgattccacatggctgggcgacagagtcatcaccaccagcacccgcacctgggccctgcccacctacaacaaccacctctacaagcaaatctccaacgggacctcgggaggaagcaccaacgacaacacctacttcggctacagcaccccctgggggtattttgacttcaacagattccactgccacttttcaccacgtgactggcagcgactcatcaacaacaactggggattccggcccaagaggctcaacttcaagctcttcaacatccaagtcaaggaggtcacgcagaatgaaggcaccaagaccatcgccaataaccttaccagcacgattcaggtctttacggactcggaataccagctcccgtacgtgctcggctcggcgcaccagggctgcctgcctccgttcccggcggacgtcttcatgattcctcagtacgggtacctgactctgaacaatggcagtcaggctgtgggccggtcgtccttctactgcctggagtactttccttctcaaatgctgagaacgggcaacaactttgaattcagctacaacttcgaggacgtgcccttccacagcagctacgcgcacagccagagcctggaccggctgatgaaccctctcatcgaccagtacttgtactacctgtcccggactcaaagcacgggcggtactgcaggaactcagcagttgctattttctcaggccgggcctaacaacatgtcggctcaggccaagaactggctacccggtccctgctaccggcagcaacgcgtctccacgacactgtcgcagaacaacaacagcaactttgcctggacgggtgccaccaagtatcatctgaatggcagagactctctggtgaatcctggcgttgccatggctacccacaaggacgacgaagagcgattttttccatccagcggagtcttaatgtttgggaaacagggagctggaaaagacaacgtggactatagcagcgtgatgctaaccagcgaggaagaaataaagaccaccaacccagtggccacagaacagtacggcgtggtggccgataacctgcaacagcaaaacgccgctcctattgtaggggccgtcaatagtcaaggagccttacctggcatggtgtggcagaaccgggacgtgtacctgcagggtcccatctgggccaagattcctcatacggacggcaactttcatccctcgccgctgatgggaggctttggactgaagcatccgcctcctcagatcctgattaaaaacacacctgttcccgcggatcctccgaccaccttcactaaggccaagctggcttctttcatcacgcagtacagtaccggccaggtcagcgtggagatcgagtgggagctgcagaaggagaacagcaaacgctggaacccagagattcagtacacttccaactactacaaatctacaaatgtggactttgctgtcaatactgagggtacttattccgagcctcgccccattggcacccgttacctcacccgtaatctgtaattacatgttaatcaataaaccggttaattcgtttcagttgaactttggtctcctgtccttcttatcttatcggttaccatagaaactggttacttattaactgcttggtgcgcttcgcgataaaagacttacgtcatcgggttacccctagtgatgga

SEQ ID NO: 1237 - DNA, 2208 bp, synthetic construct
  misc_feature 1..2208: note = source = /note="Description of Artificial Sequence: Synthetic polynucleotide"
  source 1..2208: mol_type = other DNA
atggctgccgatggttatcttccagattggctcgaggacactctctctgaaggaataagacagtggtggaagctcaaacctggcccaccaccaccaaagcccgcagagcggcataaggacgacagcaggggtcttgtgcttcctgggtacaagtacctcggacccttcaacggactcgacaagggagagccggtcaacgaggcagacgccgcggccctcgagcacgacaaagcctacgaccggcagctcgacagcggagacaacccgtacctcaagtacaaccacgccgacgcggagtttcaggagcgccttaaagaagatacgtcttttgggggcaacctcggacgagcagtcttccaggcgaaaaagagggttcttgaacctctgggcctggttgaggaacctgttaagaaggctccgggaaaaaagaggccggtagagcactctcctgtggagccagactcctcctcgggaaccggaaaggcgggccagcagcctgcaagaaaaagattgaattttggtcagactggagacgcagactcagtacctgacccccagcctctcggacagccaccagcagccccctctggtctgggaactaataccatggctacaggcagtggcgcaccaatggcagacaataacgagggtgccgacggagtgggtaattcctcgggaaattggcattgcgattccacatggatgggcgacagagtcatcaccaccagcacccgaacctgggccctgcccacctacaacaaccacctctacaaacaaatttccagccaatcaggagcctcgaacgacaatcactactttggctacagcaccccttgggggtattttgacttcaacagattccactgccacttttcaccacgtgactggcaaagactcatcaacaacaactggggattccgacccaagagactcaacttcaagctctttaacattcaagtcaaagaggtcacgcagaatgacggtacgacgacgattgccaataaccttaccagcacggttcaggtgtttactgactcggagtaccagctcccgtacgtcctcggctcggcgcatcaaggatgcctcccgccgttcccagcagacgtcttcatggtgccacagtatggatacctcaccctgaacaacgggagtcaggcagtaggacgctcttcattttactgcctggagtactttccttctcagatgctgcgtaccggaaacaactttaccttcagctacacttttgaggacgttcctttccacagcagctacgctcacagccagagtctggaccgtctcatgaatcctctcatcgaccagtacctgtattacttgagcagaacaaacactccaagtggaaccaccacgcagtcaaggcttcagttttctcaggccggagcgagtgacattcgggaccagtctaggaactggcttcctggaccctgttaccgccagcagcgagtatcaaagacatctgcggataacaacaacagtgaatactcgtggactggagctaccaagtaccacctcaatggcagagactctctggtgaatccgggcccggctatggcaagccacaaggacgatgaagaaaagttttttcctcagagcggggttctcatctttgggaagcaaggctcagagaaaacaaatgtggacattgaaaaggtcatgattacagacgaagaggaaatcaggacaaccaatcccgtggctacggagcagtatggttctgtatctaccaacctccagagaggcaacagacaagcagctaccgcagatgtcaacacacaaggcgttcttccaggcatggtctggcaggacagagatgtgtaccttcaggggcccatctgggcaaagattccacacacggacggacattttcacccctctcccctcatgggtggattcggacttaaacaccctcctccacagattctcatcaagaacaccccggtgcctgcgaatccttcgaccaccttcagtgcggcaaagtttgcttccttcatcacacagtactccacgggacaggtcagcgtggagatcgagtgggagctgcagaaggaaaacagcaaacgctggaatcccgaaattcagtacacttccaactacaacaagtctgttaatgtggactttactgtggacactaatggcgtgtattcagagcctcgccccattggcaccagatacctgactcgtaatctgtaa

SEQ ID NO: 1238 - protein, 735 aa, synthetic construct
  REGION 1..735: note = source = /note="Description of Artificial Sequence: Synthetic polypeptide"
MAADGYLPDWLEDTLSEGIRQWWKLKPGPPPPKPAERHKDDSRGLVLPGYKYLGPFNGLDKGEPVNEADAAALEHDKAYDRQLDSGDNPYLKYNHADAEFQERLKEDTSFGGNLGRAVFQAKKRVLEPLGLVEEPVKKAPGKKRPVEHSPVEPDSSSGTGKAGQQPARKRLNFGQTGDADSVPDPQPLGQPPAAPSGLGTNTMATGSGAPMADNNEGADGVGNSSGNWHCDSTWMGDRVITTSTRTWALPTYNNHLYKQISSQSGASNDNHYFGYSTPWGYFDFNRFHCHFSPRDWQRLINNNWGFRPKRLNFKLFNIQVKEVTQNDGTTTIANNLTSTVQVFTDSEYQLPYVLGSAHQGCLPPFPADVFMVPQYGYLTLNNGSQAVGRSSFYCLEYFPSQMLRTGNNFTFSYTFEDVPFHSSYAHSQSLDRLMNPLIDQYLYYLSRTNTPSGTTTQSRLQFSQAGASDIRDQSRNWLPGPCYRQQRVSKTSADNNNSEYSWTGATKYHLNGRDSLVNPGPAMASHKDDEEKFFPQSGVLIFGKQGSEKTNVDIEKVMITDEEEIRTTNPVATEQYGSVSTNLQRGNRQAATADVNTQGVLPGMVWQDRDVYLQGPIWAKIPHTDGHFHPSPLMGGFGLKHPPPQILIKNTPVPANPSTTFSAAKFASFITQYSTGQVSVEIEWELQKENSKRWNPEIQYTSNYNKSVNVDFTVDTNGVYSEPRPIGTRYLTRNL

SEQ ID NO: 1239 - DNA, 8376 bp, synthetic construct
  misc_feature 1..8376: note = source = /note="Description of Artificial Sequence: Synthetic polynucleotide"
  source 1..8376: mol_type = other DNA
aattcccatcatcaataatataccttattttggattgaagccaatatgataatgagggggtggagtttgtgacgtggcgcggggcgtgggaacggggcgggtgacgtagtagtctctagagtcctgtattagaggtcacgtgagtgttttgcgacattttgcgacaccatgtggtcacgctgggtatttaagcccgagtgagcacgcagggtctccattttgaagcgggaggtttgaacgcgcagccaccacgccggggttttacgagattgtgattaaggtccccagcgaccttgacgggcatctgcccggcatttctgacagctttgtgaactgggtggccgagaaggaatgggagttgccgccagattctgacatggatctgaatctgattgagcaggcacccctgaccgtggccgagaagctgcagcgcgactttctgacggaatggcgccgtgtgagtaaggccccggaggcccttttctttgtgcaatttgagaagggagagagctacttccacatgcacgtgctcgtggaaaccaccggggtgaaatccatggttttgggacgtttcctgagtcagattcgcgaaaaactgattcagagaatttaccgcgggatcgagccgactttgccaaactggttcgcggtcacaaagaccagaaatggcgccggaggcgggaacaaggtggtggatgagtgctacatccccaattacttgctccccaaaacccagcctgagctccagtgggcgtggactaatatggaacagtatttaagcgcctgtttgaatctcacggagcgtaaacggttggtggcgcagcatctgacgcacgtgtcgcagacgcaggagcagaacaaagagaatcagaatcccaattctgatgcgccggtgatcagatcaaaaacttcagccaggtacatggagctggtcgggtggctcgtggacaaggggattacctcggagaagcagtggatccaggaggaccaggcctcatacatctccttcaatgcggcctccaactcgcggtcccaaatcaaggctgccttggacaatgcgggaaagattatgagcctgactaaaaccgcccccgactacctggtgggccagcagcccgtggaggacatttccagcaatcggatttataaaattttggaactaaacgggtacgatccccaatatgcggcttccgtctttctgggatgggccacgaaaaagttcggcaagaggaacaccatctggctgtttgggcctgcaactaccgggaagaccaacatcgcggaggccatagcccacactgtgcccttctacgggtgcgtaaactggaccaatgagaactttcccttcaacgactgtgtcgacaagatggtgatctggtgggaggaggggaagatgaccgccaaggtcgtggagtcggccaaagccattctcggaggaagcaaggtgcgcgtggaccagaaatgcaagtcctcggcccagatagacccgactcccgtgatcgtcacctccaacaccaacatgtgcgccgtgattgacgggaactcaacgaccttcgaacaccagcagccgttgcaagaccggatgttcaaatttgaactcacccgccgtctggatcatgactttgggaaggtcaccaagcaggaagtcaaagactttttccggtgggcaaaggatcacgtggttgaggtggagcatgaattctacgtcaaaaagggtggagccaagaaaagacccgcccccagtgacgcagatataagtgagcccaaacgggtgcgcgagtcagttgcgcagccatcgacgtcagacgcggaagcttcgatcaactacgcagacaggtaccaaaacaaatgttctcgtcacgtgggcatgaatctgatgctgtttccctgcagacaatgcgagagaatgaatcagaattcaaatatctgcttcactcacggacagaaagactgtttagagtgctttcccgtgtcagaatctcaacccgtttctgtcgtcaaaaaggcgtatcagaaactgtgctacattcatcatatcatgggaaaggtgccagacgcttgcactgcctgcgatctggtcaatgtggatttggatgactgcatctttgaacaataaatgatttaaatcaggtatggctgccgatggttatcttccagattggctcgaggacactctctctgaaggaataagacagtggtggaagctcaaacctggcccaccaccaccaaagcccgcagagcggcataaggacgacagcaggggtcttgtgcttcctgggtacaagtacctcggacccttcaacggactcgacaagggagagccggtcaacgaggcagacgccgcggccctcgagcacgacaaagcctacgaccggcagctcgacagcggagacaacccgtacctcaagtacaaccacgccgacgcggagtttcaggagcgccttaaagaagatacgtcttttgggggcaacctcggacgagcagtcttccaggcgaaaaagagggttcttgaacctctgggcctggttgaggaacctgttaagacggctccgggaaaaaagaggccggtagagcactctcctgtggagccagactcctcctcgggaaccggaaaggcgggccagcagcctgcaagaaaaagattgaattttggtcagactggagacgcagactcagtacctgacccccagcctctcggacagccaccagcagccccctctggtctgggaactaatacgatggctacaggcagtggcgcaccaatggcagacaataacgagggcgccgacggagtgggtaattcctcgggaaattggcattgcgattccacatggatgggcgacagagtcatcaccaccagcacccgaacctgggccctgcccacctacaacaaccacctctacaaacaaatttccagccaatcaggagcctcgaacgacaatcactactttggctacagcaccccttgggggtattttgacttcaacagattccactgccacttttcaccacgtgactggcaaagactcatcaacaacaactggggattccgacccaagagactcaacttcaagctctttaacattcaagtcaaagaggtcacgcagaatgacggtacgacgacgattgccaataaccttaccagcacggttcaggtgtttactgactcggagtaccagctcccgtacgtcctcggctcggcgcatcaaggatgcctcccgccgttcccagcagacgtcttcatggtgccacagtatggatacctcaccctgaacaacgggagtcaggcagtaggacgctcttcattttactgcctggagtactttccttctcagatgctgcgtaccggaaacaactttaccttcagctacacttttgaggacgttcctttccacagcagctacgctcacagccagagtctggaccgtctcatgaatcctctcatcgaccagtacctgtattacttgagcagaacaaacactccaagtggaaccaccacgcagtcaaggcttcagttttctcaggccggagcgagtgacattcgggaccagtctaggaactggcttcctggaccctgttaccgccagcagcgagtatcaaagacatctgcggataacaacaacagtgaatactcgtggactggagctaccaagtaccacctcaatggcagagactctctggtgaatccgggcccggccatggcaagccacaaggacgatgaagaaaagttttttcctcagagcggggttctcatctttgggaagcaaggctcagagaaaacaaatgtggacattgaaaaggtcatgattacagacgaagaggaaatcaggacaaccaatcccgtggctacggagcagtatggttctgtatctaccaacctccagagaggcaacagacaagcagctaccgcagatgtcaacacacaaggcgttcttccaggcatggtctggcaggacagagatgtgtaccttcaggggcccatctgggcaaagattccacacacggacggacattttcacccctctcccctcatgggtggattcggacttaaacaccctcctccacagattctcatcaagaacaccccggtacctgcgaatccttcgaccaccttcagtgcggcaaagtttgcttccttcatcacacagtactccacgggacaggtcagcgtggagatcgagtgggagctgcagaaggaaaacagcaaacgctggaatcccgaaattcagtacacttccaactacaacaagtctgttaatgtggactttactgtggacactaatggcgtgtattcagagcctcgccccattggcaccagatacctgactcgtaatctgtaattgcttgttaatcaataaaccgtttaattcgtttcagttgaactttggtctctgcgtatttctttcttatctagtttccatgctctagagtcctgtattagaggtcacgtgagtgttttgcgacattttgcgacaccatgtggtcacgctgggtatttaagcccgagtgagcacgcagggtctccattttgaagcgggaggtttgaacgcgcagccaccacggcggggttttacgagattgtgattaaggtccccagcgaccttgacgggcatctgcccggcatttctgacagctttgtgaactgggtggccgagaaggaatgggagttgccgccagattctgacatggatctgaatctgattgagcaggcacccctgaccgtggccgagaagctgcatcgctggcgtaatagcgaagaggcccgcaccgatcgcccttcccaacagttgcgcagcctgaatggcgaatggaattccagacgattgagcgtcaaaatgtaggtatttccatgagcgtttttcctgttgcaatggctggcggtaatattgttctggatattaccagcaaggccgatagtttgagttcttctactcaggcaagtgatgttattactaatcaaagaagtattgcgacaacggttaatttgcgtgatggacagactcttttactcggtggcctcactgattataaaaacacttctcaggattctggcgtaccgttcctgtctaaaatccctttaatcggcctcctgtttagctcccgctctgattctaacgaggaaagcacgttatacgtgctcgtcaaagcaaccatagtacgcgccctgtagcggcgcattaagcgcggcgggtgtggtggttacgcgcagcgtgaccgctacacttgccagcgccctagcgcccgctcctttcgctttcttcccttcctttctcgccacgttcgccggctttccccgtcaagctctaaatcgggggctccctttagggttccgatttagtgctttacggcacctcgaccccaaaaaacttgattagggtgatggttcacgtagtgggccatcgccctgatagacggtttttcgccctttgacgttggagtccacgttctttaatagtggactcttgttccaaactggaacaacactcaaccctatctcggtctattcttttgatttataagggattttgccgatttcggcctattggttaaaaaatgagctgatttaacaaaaatttaacgcgaattttaacaaaatattaacgtttacaatttaaatatttgcttatacaatcttcctgtttttggggcttttctgattatcaaccggggtacatatgattgacatgctagttttacgattaccgttcatcgattctcttgtttgctccagactctcaggcaatgacctgatagcctttgtagagacctctcaaaaatagctaccctctccggcatgaatttatcagctagaacggttgaatatcatattgatggtgatttgactgtctccggcctttctcacccgtttgaatctttacctacacattactcaggcattgcatttaaaatatatgagggttctaaaaatttttatccttgcgttgaaataaaggcttctcccgcaaaagtattacagggtcataatgtttttggtacaaccgatttagctttatgctctgaggctttattgcttaattttgctaattctttgccttgcctgtatgatttattggatgttggaattcctgatgcggtattttctccttacgcatctgtgcggtatttcacaccgcatatggtgcactctcagtacaatctgctctgatgccgcatagttaagccagccccgacacccgccaacacccgctgacgcgccctgacgggcttgtctgctcccggcatccgcttacagacaagctgtgaccgtctccgggagctgcatgtgtcagaggttttcaccgtcatcaccgaaacgcgcgagacgaaagggcctcgtgatacgcctatttttataggttaatgtcatgataataatggtttcttagacgtcaggtggcacttttcggggaaatgtgcgcggaacccctatttgtttatttttctaaatacattcaaatatgtatccgctcatgagacaataaccctgataaatgcttcaataatattgaaaaaggaagagtatgagtattcaacatttccgtgtcgcccttattcccttttttgcggcattttgccttcctgtttttgctcacccagaaacgctggtgaaagtaaaagatgctgaagatcagttgggtgcacgagtgggttacatcgaactggatctcaacagcggtaagatccttgagagttttcgccccgaagaacgttttccaatgatgagcacttttaaagttctgctatgtggcgcggtattatcccgtattgacgccgggcaagagcaactcggtcgccgcatacactattctcagaatgacttggttgagtactcaccagtcacagaaaagcatcttacggatggcatgacagtaagagaattatgcagtgctgccataaccatgagtgataacactgcggccaacttacttctgacaacgatcggaggaccgaaggagctaaccgcttttttgcacaacatgggggatcatgtaactcgccttgatcgttgggaaccggagctgaatgaagccataccaaacgacgagcgtgacaccacgatgcctgtagcaatggcaacaacgttgcgcaaactattaactggcgaactacttactctagcttcccggcaacaattaatagactggatggaggcggataaagttgcaggaccacttctgcgctcggcccttccggctggctggtttattgctgataaatctggagccggtgagcgtgggtctcgcggtatcattgcagcactggggccagatggtaagccctcccgtatcgtagttatctacacgacggggagtcaggcaactatggatgaacgaaatagacagatcgctgagataggtgcctcactgattaagcattggtaactgtcagaccaagtttactcatatatactttagattgatttaaaacttcatttttaatttaaaaggatctaggtgaagatcctttttgataatctcatgaccaaaatcccttaacgtgagttttcgttccactgagcgtcagaccccgtagaaaagatcaaaggatcttcttgagatcctttttttctgcgcgtaatctgctgcttgcaaacaaaaaaaccaccgctaccagcggtggtttgtttgccggatcaagagctaccaactctttttccgaaggtaactggcttcagcagagcgcagataccaaatactgtccttctagtgtagccgtagttaggccaccacttcaagaactctgtagcaccgcctacatacctcgctctgctaatcctgttaccagtggctgctgccagtggcgataagtcgtgtcttaccgggttggactcaagacgatagttaccggataaggcgcagcggtcgggctgaacggggggttcgtgcacacagcccagcttggagcgaacgacctacaccgaactgagatacctacagcgtgagctatgagaaagcgccacgcttcccgaagggagaaaggcggacaggtatccggtaagcggcagggtcggaacaggagagcgcacgagggagcttccagggggaaacgcctggtatctttatagtcctgtcgggtttcgccacctctgacttgagcgtcgatttttgtgatgctcgtcaggggggcggagcctatggaaaaacgccagcaacgcggcctttttacggttcctggccttttgctggccttttgctcacatgttctttcctgcgttatcccctgattctgtggataaccgtattaccgcctttgagtgagctgataccgctcgccgcagccgaacgaccgagcgcagcgagtcagtgagcgaggaagcggaagagcgcccaatacgcaaaccgcctctccccgcgcgttggccgattcattaatgca

SEQ ID NO: 1240 - DNA, 1085 bp, synthetic construct
  misc_difference 611: note = modified_base - a, c, t, or g
  misc_difference 640: note = modified_base - a, c, t, or g
  misc_difference 1039: note = modified_base - a, c, t, or g
  misc_feature 1..1085: note = source = /note="Description of Artificial Sequence: Synthetic polynucleotide"
  source 1..1085: mol_type = other DNA
tgcccacttacaacaaccatctctacaagcaaatctccagcvvmdcaggagctascaacgacaaccactactttggctacagcaccccttgggggtattttgactttaacagattccactgccacttctcaccacgtgactggcagcgactcattaacaacaactggggattccggcccaagaaactcagcttcaagctcttcaacatccaagttagaggggtcacgcagaacgatggcacgacgactattgccaataaccttaccagcacggttcaagtgtttacggactcggagtatcagctcccgtacgtgctcgggtcggcgcaccaaggctgtctcccgccgtttccagcggacgtcttcatggtccctcagtatggatacctcaccctgaacaacggaagtcaagcggtgggacgctcatccttttactgcctggagtacttcccttcgcagatgctaaggactggaaataacttccaattcagctataccttcgaggatgtaccttttcacagcagctacgctcacagccagagtttggatcgcttgatgaatcctcttattgatcagtatctgtactacctgaacagaacgcaargcamcvcnrgcggaacarccrvcmhsmrsvvsctgvngtttagccaggctgggcctcagtctatgtctttgcaggccagaaattggctacctgggccctgctaccggcaacagagactttcaamarycbmcrvcsrsaacaacaacagtrastttccttggmcagcggccagcamatatcatctcaatggccgcgactcgctggtgaatccaggaccagctatggccagtcacrrggacgatrmsgrsaratttttccctatgcacggcaatctaatatttggcaaasaarrcrscrvsrvarvcratrycgmsdwcgrsvrsgtaatgattacggatgaagaagagattcgtaccaccaatcctgtggcaacagagcagtatggaactgtggcaaataacttgcagrvsvvsmrsrvcvvscccacgdhtvvsrnsgtcvmscatcagggggccttacctggcatggtgtggcaagatcgt

SEQ ID NO: 1241 - protein, 620 aa, synthetic construct
  VARIANT 263..264: note = MOD_RES - Any naturally occurring amino acid
  VARIANT 267: note = MOD_RES - Any naturally occurring amino acid
  VARIANT 450..453: note = MOD_RES - Any naturally occurring amino acid
  VARIANT 456..460: note = MOD_RES - Any naturally occurring amino acid
  VARIANT 462: note = MOD_RES - Any naturally occurring amino acid
  VARIANT 491..495: note = MOD_RES - Any naturally occurring amino acid
  VARIANT 500: note = MOD_RES - Any naturally occurring amino acid
  VARIANT 504: note = MOD_RES - Any naturally occurring amino acid
  VARIANT 508: note = MOD_RES - Any naturally occurring amino acid
  VARIANT 528: note = MOD_RES - Any naturally occurring amino acid
  VARIANT 531..533: note = MOD_RES - Any naturally occurring amino acid
  VARIANT 546..557: note = MOD_RES - Any naturally occurring amino acid
  VARIANT 586..590: note = MOD_RES - Any naturally occurring amino acid
  VARIANT 593..595: note = MOD_RES - Any naturally occurring amino acid
  VARIANT 597: note = MOD_RES - Any naturally occurring amino acid
  REGION 1..620: note = source = /note="Description of Artificial Sequence: Synthetic polypeptide"
MAADGYLPDWLEDNLSEGIREWWALKPGVPQPKANQQHQDNRRGLVLPGYKYLGPGNGLDKGEPVNEADAAALEHDKAYDQQLKAGDNPYLKYNHADAEFQERLQEDTSFGGNLGRAVFQAKKRILEPLGLVEEAAKTAPGKKGAVDQSPQEPDSSSGVGKSGKQPARKRLNFGQTGDSESVPDPQPLGEPPAAPTSLGSNTMASGGGAPMADNNEGADGVGNSSGNWHCDSQWLGDRVITTSTRTWALPTYNNHLYKQISSXXGAXNDNHYFGYSTPWGYFDFNRFHCHFSPRDWQRLINNNWGFRPKKLSFKLFNIQVRGVTQNDGTTTIANNLTSTVQVFTDSEYQLPYVLGSAHQGCLPPFPADVFMVPQYGYLTLNNGSQAVGRSSFYCLEYFPSQMLRTGNNFQFSYTFEDVPFHSSYAHSQSLDRLMNPLIDQYLYYLNRTQXXXXGTXXXXXLXFSQAGPQSMSLQARNWLPGPCYRQQRLSXXXXXNNNSXFPWXAASXYHLNGRDSLVNPGPAMASHXDDXXXFFPMHGNLIFGKXXXXXXXXXXXXVMITDEEEIRTTNPVATEQYGTVANNLQXXXXXPTXXXVXHQGALPGMVWQDRDVYLQGPIWA

SEQ ID NO: 1242 - DNA, 1491 bp, synthetic construct
  misc_feature 1..1491: note = source = /note="Description of Artificial Sequence: Synthetic polynucleotide"
  source 1..1491: mol_type = other DNA
accaccagcaccagaacctgggccctgcccacttacaacaaccatctctacaagcaaatctccagccaatcaggagcttcaaacgacaaccactactttggctacagcaccccttgggggtattttgactttaacagattccactgccacttctcaccacgtgactggcagcgactcattaacaacaactggggattccggcccaagaaactcagcttcaagctcttcaacatccaagttagaggggtcacgcagaacgatggcacgacgactattgccaataaccttaccagcacggttcaagtgtttacggactcggagtatcagctcccgtacgtgctcgggtcggcgcaccaaggctgtctcccgccgtttccagcggacgtcttcatggtccctcagtatggatacctcaccctgaacaacggaagtcaagcggtgggacgctcatccttttactgcctggagtacttcccttcgcagatgctaaggactggaaataacttccaattcagctataccttcgaggatgtaccttttcacagcagctacgctcacagccagagtttggatcgcttgatgaatcctcttattgatcagtatctgtactacctgaacagaacgcaaggaacaacctctggaacaaccaaccaatcacggctgctttttagccaggctgggcctcagtctatgtctttgcaggccagaaattggctacctgggccctgctaccggcaacagagactttcaaagactgctaacgacaacaacaacagtaactttccttggacagcggccagcaaatatcatctcaatggccgcgactcgctggtgaatccaggaccagctatggccagtcacaaggacgatgaagaaaaatttttccctatgcacggcaatctaatatttggcaaagaagggacaacggcaagtaacgcagaattagataatgtaatgattacggatgaagaagagattcgtaccaccaatcctgtggcaacagagcagtatggaactgtggcaaataacttgcagagctcaaatacagctcccacgactggaactgtcaatcatcagggggccttacctggcatggtgtggcaagatcgtgacgtctaccttcaaggacctatctgggcaaagattcctcacacggatggacactttcatccttctcctctgatgggaggctttggactgaaacatccgcctcctcaaatcatgatcaaaaatactccggtaccggcaaatcctccgacgactttcagcccggccaagtttgcttcatttatcactcagtactccactggacaggtcagcgtggaaattgagtgggagctacagaaagaaaacagcaaacgttggaatccagagattcagtacacttccaactacaacaagtctgttaatgtggactttactgtagacactaatggtgtttatagtgaacctcgccctattggaacccggtatctcacacgaaacttgtga

SEQ ID NO: 1243 - protein, 482 aa, synthetic construct
  REGION 1..482: note = source = /note="Description of Artificial Sequence: Synthetic polypeptide"
TTSTRTWALPTYNNHLYKQISSQSGASNDNHYFGYSTPWYFDFNRFHCHFSPRDWQRLNNNWGFRPKKLSFKLFNIQRGVTQNDGTTTIANNLTSTQVFTDSEYQLPYVLGSAHQCLPPFPADVFMVPQYGYLTNNGSQAVGRSSFYCLEYFPQMLRTGNNFQFSYTFEDVPHSSYAHSQSLDRLMNPLIDYLYYLNRTQGTTSGTTNQSLLFSQAGPQSMSLQARNWLGPCYRQQRLSKTANDNNNSFPWTAASKYHLNGRDSLVNGPAMASHKDDEEKFFPMHGLIFGKEGTTASNAELDNVMITDEEEIRTTNPVATEQYGTVANNLQSSNTAPTTGTVNHQGALPGMVWQDRDVYLQGPIWAKIPHTDGHFHPSPLMGGFGLKHPPPQIMIKNTPVPANPPTTFSPAKFASFITQYSTGQVSVEIEWELQKENSKRWNPEIQYTSNYNKSVNVDFTVDTNGVYSEPRPIGTRYLTRNL

SEQ ID NO: 1244 - DNA, 1140 bp, synthetic construct
  misc_difference 636: note = modified_base - a, c, t, or g
  misc_difference 665: note = modified_base - a, c, t, or g
  misc_difference 1064: note = modified_base - a, c, t, or g
  misc_feature 1..1140: note = source = /note="Description of Artificial Sequence: Synthetic polynucleotide"
  source 1..1140: mol_type = other DNA
accaccagcaccagaacctgggccctgcccacttacaacaaccatctctacaagcaaatctccagcvvmdcaggagctascaacgacaaccactactttggctacagcaccccttgggggtattttgactttaacagattccactgccacttctcaccacgtgactggcagcgactcattaacaacaactggggattccggcccaagaaactcagcttcaagctcttcaacatccaagttagaggggtcacgcagaacgatggcacgacgactattgccaataaccttaccagcacggttcaagtgtttacggactcggagtatcagctcccgtacgtgctcgggtcggcgcaccaaggctgtctcccgccgtttccagcggacgtcttcatggtccctcagtatggatacctcaccctgaacaacggaagtcaagcggtgggacgctcatccttttactgcctggagtacttcccttcgcagatgctaaggactggaaataacttccaattcagctataccttcgaggatgtaccttttcacagcagctacgctcacagccagagtttggatcgcttgatgaatcctcttattgatcagtatctgtactacctgaacagaacgcaargcamcvcnrgcggaacarccrvcmhsmrsvvsctgvngtttagccaggctgggcctcagtctatgtctttgcaggccagaaattggctacctgggccctgctaccggcaacagagactttcaamarycbmcrvcsrsaacaacaacagtrastttccttggmcagcggccagcamatatcatctcaatggccgcgactcgctggtgaatccaggaccagctatggccagtcacrrggacgatrmsgrsaratttttccctatgcacggcaatctaatatttggcaaasaarrcrscrvsrvarvcratrycgmsdwcgrsvrsgtaatgattacggatgaagaagagattcgtaccaccaatcctgtggcaacagagcagtatggaactgtggcaaataacttgcagrvsvvsmrsrvcvvscccacgdhtvvsrnsgtcvmscatcagggggccttacctggcatggtgtggcaagatcgtgacgtctaccttcaaggacctatctgggca

SEQ ID NO: 1245 - protein, 620 aa, synthetic construct; identical to SEQ ID NO: 1241
  VARIANT 263..264: note = MOD_RES - Any naturally occurring amino acid
  VARIANT 267: note = MOD_RES - Any naturally occurring amino acid
  VARIANT 450..453: note = MOD_RES - Any naturally occurring amino acid
  VARIANT 456..460: note = MOD_RES - Any naturally occurring amino acid
  VARIANT 462: note = MOD_RES - Any naturally occurring amino acid
  VARIANT 491..495: note = MOD_RES - Any naturally occurring amino acid
  VARIANT 500: note = MOD_RES - Any naturally occurring amino acid
  VARIANT 504: note = MOD_RES - Any naturally occurring amino acid
  VARIANT 508: note = MOD_RES - Any naturally occurring amino acid
  VARIANT 528: note = MOD_RES - Any naturally occurring amino acid
  VARIANT 531..533: note = MOD_RES - Any naturally occurring amino acid
  VARIANT 546..557: note = MOD_RES - Any naturally occurring amino acid
  VARIANT 586..590: note = MOD_RES - Any naturally occurring amino acid
  VARIANT 593..595: note = MOD_RES - Any naturally occurring amino acid
  VARIANT 597: note = MOD_RES - Any naturally occurring amino acid
  REGION 1..620: note = source = /note="Description of Artificial Sequence: Synthetic polypeptide"

SEQ ID NO: 1246 - protein, 738 aa, synthetic construct; identical to SEQ ID NO: 18
  REGION 1..738: note = source = /note="Description of Artificial Sequence: Synthetic polypeptide"

SEQ ID NO: 1247 - DNA, 2258 bp, synthetic construct
  misc_feature 1..2258: note = source = /note="Description of Artificial Sequence: Synthetic polynucleotide"
  source 1..2258: mol_type = other DNA
tcgaggacaacctctctgagggcattcgcgagtggtgggacttgaaacctggagccccgaaacccaaagccaaccagcaaaagcaggacgacggccggggtctggtgcttcctggctacaagtacctcggacccttcaacggactcgacaagggggagcccgtcaacgcggcggacgcagcggccctcgagcacgacaaggcctacgaccagcagctcaaagcgggtgacaatccgtacctgcggtataaccacgccgacgccgagtttcaggagcgtctgcaagaagatacgtcttttgggggcaacctcgggcgagcagtcttccaggccaagaagcgggttctcgaacctctcggtctggttgaggaaggcgctaagacggctcctggaaagaagagaccggtagagccatcaccccagcgttctccagactcctctacgggcatcggcaagaaaggccagcagcccgcgaaaaagagactcaactttgggcagactggcgactcagagtcagtgcccgaccctcaaccaatcggagaaccccccgcaggcccctctggtctgggatctggtacaatggctgcaggcggtggcgctccaatggcagacaataacgaaggcgccgacggagtgggtagttcctcaggaaattggcattgcgattccacatggctgggcgacagagtcatcaccaccagcacccgaacctgggccctccccacctacaacaaccacctctacaagcaaatctccaacgggacttcgggaggaagcaccaacgacaacacctacttcggctacagcaccccctgggggtattttgactttaacagattccactgccacttctcaccacgtgactggcagcgactcatcaacaacaactggggattccggcccaagagactcaacttcaagctcttcaacatccaggtcaaggaggtcacgcagaatgaaggcaccaagaccatcgccaataaccttaccagcacgattcaggtctttacggactcggaataccagctcccgtacgtcctcggctctgcgcaccagggctgcctgcctccgttcccggcggacgtcttcatgattcctcagtacgggtacctgactctgaacaatggcagtcaggccgtgggccgttcctccttctactgcctggagtactttccttctcaaatgctgagaacgggcaacaactttgagttcagctaccagtttgaggacgtgccttttcacagcagctacgcgcacagccaaagcctggaccggctgatgaaccccctcatcgaccagtacctgtactacctgtctcggactcagtccacgggaggtaccgcaggaactcagcagttgctattttctcaggccgggcctaataacatgtcggctcaggccaaaaactggctacccgggccctgctaccggcagcaacgcgtctccacgacactgtcgcaaaataacaacagcaactttgcctggaccggtgccaccaagtatcatctgaatggcagagactctctggtaaatcccggtgtcgctatggcaacccacaaggacgacgaagagcgattttttccgtccagcggagtcttaatgtttgggaaacagggagctggaaaagacaacgtggactatagcagcgttatgctaaccagtgaggaagaaattaaaaccaccaacccagtggccacagaacagtacggcgtggtggccgataacctgcaacagcaaaacgccgctcctattgtaggggccgtcaacagtcaaggagccttacctggcatggtctggcagaaccgggacgtgtacctgcagggtcctatctgggccaagattcctcacacggacggaaactttcatccctcgccgctgatgggaggctttggactgaaacacccgcctcctcagatcctgattaagaatacacctgttcccgcggatcctccaactaccttcagtcaagctaagctggcgtcgttcatcacgcagtacagcaccggacaggtcagcgtggaaattgaatgggagctgcagaaagaaaacagcaaacgctggaacccagagattcaatacacttccaactactacaaatctacaaatgtggactttgctgttaacacagatggcacttattctgagcctcgccccatcggcacccgttacctcacccgtaatctgtaattgcttgttaatcaataaaccggttgattcgtttcagttgaactttggtctctgcgaagggcgaattcgttt

SEQ ID NO: 1248 - DNA, 2208 bp, synthetic construct
  misc_feature 1..2208: note = source = /note="Description of Artificial Sequence: Synthetic polynucleotide"
  source 1..2208: mol_type = other DNA
atggctgccgatggttatcttccagattggctcgaggacactctctctgaaggaataagacagtggtggaagctcaaacctggcccaccaccaccaaagcccgcagagcggcataaggacgacagcaggggtcttgtgcttcctgggtacaagtacctcggacccttcaacggactcgacaagggagagccggtcaacgaggcagacgccgcggccctcgagcacgacaaagcctacgaccggcagctcgacagcggagacaacccgtacctcaagtacaaccacgccgacgcggagtttcaggagcgccttaaagaagatacgtcttttgggggcaacctcggacgagcagtcttccaggcgaaaaagagggttcttgaacctctgggcctggttgaggaacctgttaagacggctccgggaaaaaagaggccggtagagcactctcctgtggagccagactcctcctcgggaaccggaaaggcgggccagcagcctgcaagaaaaagattgaattttggtcagactggagacgcagactcagtacctgacccccagcctctcggacagccaccagcagccccctctggtctgggaactaatacgatggctacaggcagtggcgcaccaatggcagacaataacgagggcgccgacggagtgggtaattcctcgggaaattggcattgcgattccacatggatgggcgacagagtcatcaccaccagcacccgaacctgggccctgcccacctacaacaaccacctctacaaacaaatttccagccaatcaggagcctcgaacgacaatcactactttggctacagcaccccttgggggtattttgacttcaacagattccactgccacttttcaccacgtgactggcaaagactcatcaacaacaactggggattccgacccaagagactcaacttcaagctctttaacattcaagtcaaagaggtcacgcagaatgacggtacgacgacgattgccaataaccttaccagcacggttcaggtgtttactgactcggagtaccagctcccgtacgtcctcggctcggcgcatcaaggatgcctcccgccgttcccagcagacgtcttcatggtgccacagtatggatacctcaccctgaacaacgggagtcaggcagtaggacgctcttcattttactgcctggagtactttccttctcagatgctgcgtaccggaaacaactttaccttcagctacacttttgaggacgttcctttccacagcagctacgctcacagccagagtctggaccgtctcatgaatcctctcatcgaccagtacctgtatttcttaagcagaacaaacactccaagtggaaccaccacgcagtcaaggcttcagttttctcaggccggagcgagtgacattcgggaccagtctaggaactggcttcctggaccctgttaccgccagcagcgagtatcaaagacatctgcggataacaacaacagtgaattctcgtggaccggtgctaccaagtaccacctcaatggcagagactctctggtgaatccgggcccggccatggcaagccacaaggacgatgaagaaaagttttttcctcagagcggggttctcatctttgggaagcaaggctcagagaaaacaaatgtggacattgaaaaggtcatgattacagacgaagaggaaatcaggacaaccaatcccgtggctacggagcagtatggttctgtatctaccaacctccagagaggcaacagacaagcagctaccgcagatgtcaacacacaaggcgttcttccaggcatggtctggcaggacagagatgtgtaccttcaggggcccatctgggcaaagattccacacacggacggacattttcacccctctcccctcatgggtggattcggacttaaacaccctcctccacagattctcatcaagaacaccccggtacctgcgaatccttcgaccaccttcagtgcggcaaagtttgcttccttcatcacacagtactccacgggacaggtcagcgtggagatcgagtgggagctgcagaaggaaaacagcaaacgctggaatcccgaaattcagtacacttccaactacaacaagtctgttaatgtggactttactgtggacactaatggcgtgtattcagagcctcgccccattggtaccagattcctgactcgtaatctgtaa

SEQ ID NO: 1249 - protein, 737 aa, synthetic construct
  REGION 1..737: note = source = /note="Description of Artificial Sequence: Synthetic polypeptide"
MAADGYLPDWLEDNLSEGIREWWDLKPGAPKPKANQQKQDNGRGLVLPGYKYLGPFNGLDKGEPVNAADAAALEHDKAYDQQLQAGDNPYLRYNHADAEFQERLQEDTSFGGNLGRAVFQAKKRVLEPLGLVESPVKTAPGKKRPVEPSPQRSPDSSTGIGKKGQQPAKKRLNFGQTGDSESVPDPQPIGEPPAAPSGVGPNTMAAGGGAPMADNNEGADGVGSSSGNWHCDSTWLGDRVITTSTRTWALPTYNNHLYKQISNGTSGGSTNDNTYFGYSTPWGYFDFNRFHCHFSPRDWQRLINNNWGFRPKRLNFKLFNIQVKEVTQNEGTKTIANNLTSTIQVFTDSEYQLPYVLGSAHQGCLPPFPADVFMIPQYGYLTLNNGSQAVGRSSFYCLEYFPSQMLRTGNNFEFSYNFEDVPFHSSYAHSQSLDRLMNPLIDQYLYYLSRTQSTGGTAGTQQLLFSQAGPNNMSAQAKNWLPGPCYRQQRVSTTLSQNNNSNFAWTGATKYHLNGRDSLVNPGVAMATHKDDEERFFPSSGVLMFGKQGAGKDNVDYSSVMLTSEEEIKTTNPVATEQYGWADNLQQQNAAPIVGAVNSQGALPGMVWQNRDVYLQGPIWAKIPHTDGNFHPSPLMGGFGLKHPPPQILIKNTPVPADPPTTFNQAKLASFITQYSTGQVSVEIEWELQKENSKRWNPEIQYTSNYYKSTNVDFAVNTEGTYSEPRPIGTRYLTRNL

SEQ ID NO: 1250 - DNA, 2211 bp, synthetic construct
  misc_feature 1..2211: note = source = /note="Description of Artificial Sequence: Synthetic polynucleotide"
  source 1..2211: mol_type = other DNA
atggctgccgatggttatcttccagattggctcgaggacactctctctgaaggaataagacagtggtggaagctcaaacctggcccaccaccaccaaagcccgcagagcggcataaggacgacagcaggggtcttgtgcttcctgggtacaagtacctcggacccttcaacggactcgacaagggagagccggtcaacgaggcagacgccgcggccctcgagcacgacaaagcctacgaccggcagctcgacagcggagacaacccgtacctcaagtacaaccacgccgacgcggagtttcaggagcgccttaaagaagatacgtcttttgggggcaacctcggacgagcagtcttccaggcgaaaaagagggttcttgaacctctgggcctggttgaggaacctgttaagacggctccgggaaaaaagaggccggtagagcactctcctgtggagccagactcctcctcgggaaccggaaaggcgggccagcagcctgcaagaaaaagattgaattttggtcagactggagacgcagactcagtacctgacccccagcctctcggacagccaccagcagccccctctggtctgggaactaatacgatggctacaggcagtggcgcaccaatggcagacaataacgagggcgccgacggagtgggtaattcctcgggaaattggcattgcgattccacatggatgggcgacagagtcatcaccaccagcacccgaacctgggccctgcccacctacaacaaccacctctacaaacaaatttccagcgcttcaacgggagcctcgaacgacaatcactactttggctacagcaccccttgggggtattttgacttcaacagattccactgccacttttcaccacgtgactggcaaagactcatcaacaacaactggggattccgacccaagagactcaacttcaagctctttaacattcaagtcaaagaggtcacgcagaatgacggtacgacgacgattgccaataaccttaccagcacggttcaggtgtttactgactcggagtaccagctcccgtacgtcctcggctcggcgcatcaaggatgcctcccgccgttcccagcagacgtcttcatggtgccacagtatggatacctcaccctgaacaacgggagtcaggcagtaggacgctcttcattttactgcctggagtactttccttctcagatgctgcgtaccggaaacaactttaccttcagctacacttttgaggacgttcctttccacagcagctacgctcacagccagagtctggaccgtctcatgaatcctctcatcgaccagtacctgtattacttgagcagaacaaacactccaagtggaaccaccacgcagtcaaggcttcagttttctcaggccggagcgagtgacattcgggaccagtctaggaactggcttcctggaccctgttaccgccagcagcgagtatcaaagacatctgcggataacaacaacagtgaatactcgtggactggagctaccaagtaccacctcaatggcagagactctctggtgaatccgggcccggccatggcaagccacaaggacgatgaagaaaagttttttcctcagagcggggttctcatctttgggaagcaaggctcagagaaaacaaatgtggacattgaaaaggtcatgattacagacgaagaggaaatcaggacaaccaatcccgtggctacggagcagtatggttctgtatctaccaacctccagagaggcaacagacaagcagctaccgcagatgtcaacacacaaggcgttcttccaggcatggtctggcaggacagagatgtgtaccttcaggggcccatctgggcaaagattccacacacggacggacattttcacccctctcccctcatgggtggattcggacttaaacaccctcctccacagattctcatcaagaacaccccggtacctgcgaatccttcgaccaccttcagtgcggcaaagtttgcttccttcatcacacagtactccacgggacaggtcagcgtggagatcgagtgggagctgcagaaggaaaacagcaaacgctggaatcccgaaattcagtacacttccaactacgccaagtctgtcaatgtggactttactgtggacaataatggcgtgtattcagagcctcgccccattggcaccagatacctgactcgtaatctgtaa

SEQ ID NO: 1251 - DNA, 2208 bp, synthetic construct
  misc_feature 1..2208: note = source = /note="Description of Artificial Sequence: Synthetic polynucleotide"
  source 1..2208: mol_type = other DNA
atggctgccgatggttatcttccagattggctcgaggacaacctctctgagggcattcgcgagtggtgggacttgaaacctggagccccgaagcccaaagccaaccagcaaaagcaggacgacggccggggtctggtgcttcctggctacaagtacctcggacccttcaacggactcgacaagggggagcccgtcaacgcggcggacgcagcggccctcgagcacgacaaggcctacgaccagcagctcaaagcgggtgacaatccgtacctgcggtataaccacgccgacgccgagtttcaggagcgtctgcaagaagatacgtcttttgggggcaacctcgggcgagcagtcttccaggccaagaagcgggttctcgaacctctcggtctggttgaggaaggcgctaagacggctcctggaaagaaacgtccggtagagcagtcgccacaagagccagactcctcctcgggcatcggcaagacaggccagcagcccgctaaaaagagactcaattttggtcagactggcgactcagagtcagtccccgatccacaacctctcggagaacctccagcaacccccgctgctgtgggacctactacaatggcttcaggcggtggcgcaccaatggcagacaataacgaaggcgccgacggagtgggtaatgcctcaggaaattggcattgcgattccacatggctgggcgacagagtcatcaccaccagcacccgcacctgggccttgcccacctacaataaccacctctacaagcaaatctccagtgcttcaggggccagcaacgacaaccactacttcggctacagcaccccctgggggtattttgatttcaacagattccactgccacttttcaccacgtgactggcagcgactcatcaacaacaattggggattccggcccaagagactcaacttcaaactcttcaacatccaagtcaaggaggtcacgacgaatgatggcgtcacaaccatcgctaataaccttaccagcacggttcaagtcttctcggactcggagtaccagcttccgtacgtcctcggctctgcgcaccagggctgcctccctccgttcccggcggacgtgttcatgattccgcaatacggctacctgacgctcaacaatggcagccaagccgtgggacgttcatccttttactgcctggaatatttcccttctcagatgctgagaacgggcaacaactttaccttcagctacacctttgaggaagtgcctttccacagcagctacgcgcacagccagagcctggaccggctgatgaatcctctcatcgaccaatacctgtattacctgaacagaactcaaaatcagtccggaagtgcccaaaacaaggacttgctgtttagccgtgggtctccagctggcatgtctgttcagcccaaaaactggctacctggaccctgttatcggcagcagcgcgtttctaaaacaaaaacagacaacaacaacagcaattttacctggactggtgcttcaaaatataacctcaatgggcgtgaatccatcatcaaccctggcactgctatggcctcacacaaagacgacgaagacaagttctttcccatgagcggtgtcatgatttttggaaaagagagcgccggagcttcaaacactgcattggacaatgtcatgattacagacgaagaggaaattaaagccactaaccctgtggccaccgaaagatttgggaccgtggcagtcaatttccagagcagcagcacagaccctgcgaccggagatgtgcatgctatgggagcattacctggcatggtgtggcaagatagagacgtgtacctgcagggtcccatttgggccaaaattcctcacacagatggacactttcacccgtctcctcttatgggcggctttggactcaagaacccgcctcctcagatcctcatcaaaaacacgcctgttcctgcgaatcctccggcggagttttcagctacaaagtttgcttcattcatcacccaatactccacaggacaagtgagtgtggaaattgaatgggagctgcagaaagaaaacagcaagcgctggaatcccgaagtgcagtacacatccaattatgcaaaatctgccaacgttgattttactgtggacaacaatggactttatactgagcctcgccccattggcacccgttaccttacccgtcccctgtaa

SEQ ID NO: 1252 - DNA, 2205 bp, synthetic construct
  misc_feature 1..2205: note = source = /note="Description of Artificial Sequence: Synthetic polynucleotide"
  source 1..2205: mol_type = other DNA
atggctgccgatggttatcttccagattggctcgaggacaacctctdgagggcattcgcgagtggtgggacttgaaacctggagccccgaaacccaaagccaaccagcaaaagcaggacgacggccggggtdggtgcttcctggctacaagtacctcggacccttcaacggactcgacaagggggagcccgtcaacgcggcggatgcagcggccctcgagcacgacaaggcctacgaccagcagctcaaagcgggtgacaatccgtacctgcggtataaccacgccgacgccgagtttcaggagcgtctgcaagaagatacgtcttttgggggcaacctcgggcgagcagtcttccaggccaagaagagggttctcgaaccttttggtdggttgaggaaggtgctaagacggctcctggaaagaaacgtccggtagagcagtcgccacaagagccagactcctcctcgggcattggcaagacaggccagcagcccgctaaaaagagactcaattttggtcagactggcgactcagagtcagtccccgacccacaacctctcggagaacctccagcaacccccgctgctgtgggacctactacaatggcttcaggcggtggcgcaccaatggcagacaataacgaaggcgccgacggagtgggtaatgcctcaggaaattggcattgcgattccacatggctgggcgacagagtcatcaccaccagcacccgaacatgggccttgcccacctataacaaccacctctacaagcaaatctccagtgcttcaggggccagcaacgacaaccactacttcggctacagcaccccctgggggtattttgatttcaacagattccactgccatttctcaccacgtgactggcagcgactcatcaacaacaattggggattccggcccaagagactcaacttcaagctcttcaacatccaagtcaaggaggtcacgacgaatgatggcgtcacgaccatcgctaataaccttaccagcacggttcaagtcttctcggactcggagtaccagttgccgtacgtcctcggctctgcgcaccagggctgcctccctccgttcccggcggacgtgttcatgattccgcagtacggctacctaacgctcaacaatggcagccaggcagtgggacggtcatccttttactgcctggaatatttcccatcgcagatgctgagaacgggcaataactttaccttcagctacaccttcgaggacgtgcctttccacagcagctacgcgcacagccagagcctggaccggctgatgaatcctctcatcgaccagtacctgtattacctgaacagaactcagaatcagtccggaagtgcccaaaacaaggacttgctgtttagccgggggtctccagctggcatgtctgttcagcccaaaaactggctacctggaccctgttaccggcagcagcgcgtttctaaaacaaaaacagacaacaacaacagcaactttacctggactggtgcttcaaaatataaccttaatgggcgtgaatctataatcaaccctggcactgctatggcctcacacaaagacgacaaagacaagttctttcccatgagcggtgtcatgatttttggaaaggagagcgccggagcttcaaacactgcattggacaatgtcatgatcacagacgaagaggaaatcaaagccactaaccccgtggccaccgaaagatttgggactgtggcagtcaatctccagagcagcagcacagaccctgcgaccggagatgtgcatgttatgggagccttacctggaatggtgtggcaagacagagacgtatacctgcagggtcctatttgggccaaaattcctcacacggatggacactttcacccgtctcctctcatgggcggctttggacttaagcacccgcctcctcagatcctcatcaaaaacacgcctgttcctgcgaatcctccggcagagttttcggctacaaagtttgcttcattcatcacccagtattccacaggacaagtgagcgtggagattgaatgggagctgcagaaagaaaacagcaaacgctggaatcccgaagtgcagtatacatctaactatgcaaaatctgccaacgttgatttcactgtggacaacaatggactttatactgagcctcgccccattggcacccgttacctcacccgtcccctgtaa

SEQ ID NO: 1253 - DNA, 2208 bp, synthetic construct
  misc_feature 1..2208: note = source = /note="Description of Artificial Sequence: Synthetic polynucleotide"
  source 1..2208: mol_type = other DNA
atggctgccgatggttatcttccagattggctcgaggacaacctctctgagggcattcgcgagtggtgggacttgaaacctggagccccgaaacccaaagccaaccagcaaaagcaggacgacggccggggtctggtgcttcctggctacaagtacctcggacccttcaacggactcgacaagggggagcccgtcaacgcggcggatgcagcggccctcgagcacgacaaggcctacgaccagcagctcaaagcgggtgacaatccgtacctgcggtataaccacgccgacgccgagtttcaggagcgtctgcaagaagatacgtcttttgggggcaacctcgggcgagcagtcttccaggccaagaagagggttctcgaaccttttggtctggttgaggaaggtgctaagacggctcctggaaagaaacgtccggtagagcagtcgccacaagagccagactcctcctcgggcattggcaagacaggccagcagcccgctaaaaagagactcaattttggtcagactggcgactcagagtcagtccccgacccacaacctctcggagaacctccagcaacccccgctgctgtgggacctactacaatggcttcaggcggtggcgcaccaatggcagacaataacgaaggcgccgacggagtgggtaatgcctcaggaaattggcattgcgattccacatggctgggcgacagagtcatcaccaccagcacccgaacatgggccttgcccacctataacaaccacctctacaagcaaatctccagtgcttcaggggccagcaacgacaaccactacttcggctacagcaccccctgggggtattttgatttcaacagattccactgccatttctcaccacgtgactggcagcgactcatcaacaacaattggggattccggcccaagagactcaacttcaagctcttcaacatccaagtcaaggaggtcacgacgaatgatggcgtcacgaccatcgctaataaccttaccagcacggttcaagtcttctcggactcggagtaccagttgccgtacgtcctcggctctgcgcaccagggctgcctccctccgttcccggcggacgtgttcatgattccgcagtacggctacctaacgctcaacaatggcagccaggcagtgggacggtcatccttttactgcctggaatatttcccatcgcagatgctgagaacgggcaataactttaccttcagctacaccttcgaggacgtgcctttccacagcagctacgcgcacagccagagcctggaccggctgatgaatcctctcatcgaccagtacctgtattacctgaacagaactcagaatcagtccggaagtgcccaaaacaaggacttgctgtttagccgggggtctccagctggcatgtctgttcagcccaaaaactggctacctggaccctgttaccggcagcagcgcgtttctaaaacaaaaacagacaacaacaacagcaactttacctggactggtgcttcaaaatataaccttaatgggcgtgaatctataatcaaccctggcactgctatggcctcacacaaagacgacgaagacaagttctttcccatgagcggtgtcatgatttttggaaaggagagcgccggagcttcaaacactgcattggacaatgtcatgatcacagacgaagaggaaatcaaagccactaaccccgtggccaccgaaagatttgggactgtggcagtcaatctccagagcagcagcacagaccctgcgaccggagatgtgcatgttatgggagccttacctggaatggtgtggcaagacagagacgtatacctgcagggtcctatttgggccaaaattcctcacacggatggacactttcacccgtctcctctcatgggcggctttggacttaagcacccgcctcctcagatcctcatcaaaaacacgcctgttcctgcgaatcctccggcagagttttcggctacaaagtttgcttcattcatcacccagtattccacaggacaagtgagcgtggagattgaatgggagctgcagaaagaaaacagcaaacgctggaatcccgaagtgcagtatacatctaactatgcaaaatctgccaacgttgatttcactgtggacaacaatggactttatactgagcctcgccccattggcacccgttacctcacccgtcccctgtaa

SEQ ID NO: 1254 - DNA, 2208 bp, synthetic construct
  misc_feature 1..2208: note = source = /note="Description of Artificial Sequence: Synthetic polynucleotide"
  source 1..2208: mol_type = other DNA
atggctgccgatggttatcttccagattggctcgaggacactctctctgaaggaataagacagtggtggaagctcaaacctggcccaccaccaccaaagcccgcagagcggcataaggacgacagcaggggtcttgtgcttcctgggtacaagtacctcggacccttcaacggactcgacaagggagagccggtcaacgaggcagacgccgcggccctcgagcacgacaaagcctacgaccggcagctcgacagcggagacaacccgtacctcaagtacaaccacgccgacgcggagtttcaggagcgccttaaagaagatacgtcttttgggggcaacctcggacgagcagtcttccaggcgaaaaagagggttcttgaacctctgggcctggttgaggaacctgttaagacggctccgggaaaaaagaggccggtagagcactctcctgtggagccagactcctcctcgggaaccggaaaggcgggccagcagcctgcaagaaaaagattgaattttggtcagactggagacgcagactcagtacctgacccccagcctctcggacagccaccagcagccccctctggtctgggaactaatacgatggctacaggcagtggcgcaccaatggcagacaataacgagggcgccgacggagtgggtaattcctcgggaaattggcattgcgattccacatggatgggcgacagagtcatcaccaccagcacccgaacctgggccctgcccacctacaacaaccacctctacaaacaaatttccagccaatcaggagcctcgaacgacaatcactactttggctacagcaccccttgggggtattttgacttcaacagattccactgccacttttcaccacgtgactggcaaagactcatcaacaacaactggggattccgacccaagagactcaacttcaagctctttaacattcaagtcaaagaggtcacgcagaatgacggtacgacgacgattgccaataaccttaccagcacggttcaggtgtttactgactcggagtaccagctcccgtacgtcctcggctcggcgcatcaaggatgcctcccgccgttcccagcagacgtcttcatggtgccacagtatggatacctcaccctgaacaacgggagtcaggcagtaggacgctcttcattttactgcctggagtactttccttctcagatgctgcgtaccggaaacaactttaccttcagctacacttttgaggacgttcctttccacagcagctacgctcacagccagagtctggaccgtctcatgaatcctctcatcgaccagtacctgtattacttgagcagaacaaacactccaagtggaaccaccacgcagtcaaggcttcagttttctgtggccggacccagtaacatggctgtccagggaaggaactggcttcctggaccctgttaccgccagcagcgagtatcaaagacatctgcggataacaacaacagtgaatttgcttggactggagctaccaagtaccacctcaatggcagagactctctggtgaatccgggcccggccatggcaagccacaaggacgatgaagaaaagttttttcctcagagcggggttctcatctttgggaagcaaggctcagagaaaacaaatgtggacattgaaaaggtcatgattacagacgaagaggaaatcaggacaaccaatcccgtggctacggagcagtatggttctgtatctaccaacctccagcaacagaacacagcaccagctaccgcagatgtcaacacacaaggcgttcttccaggcatggtctggcaggacagagatgtgtaccttcaggggcccatctgggcaaagattccacacacggacggacattttcacccctctcccctcatgggtggattcggacttaaacaccctcctccacagattctcatcaagaacaccccggtacctgcgaatccttcgaccaccttcagtgcggcaaagtttgcttccttcatcacacagtactccacgggacaggtcagcgtggagatcgagtgggagctgcagaaggaaaacagcaaacgctggaatcccgaaattcagtacacttccaactacaacaagtctgttaatgtggactttactgtggacactaatggcgtgtattcagagcctcgccccattggcaccagatacctgactcgtaatctgtaa

SEQ ID NO: 1255 - protein, 735 aa, synthetic construct
  REGION 1..735: note = source = /note="Description of Artificial Sequence: Synthetic polypeptide"
MAADGYLPDWLEDTLSEGIRQWWKLKPGPPPPKPAERHKDDSRGLVLPGYKYLGPFNGLDKGEPVNEADAAALEHDKAYDRQLDSGDNPYLKYNHADAEFQERLKEDTSFGGNLGRAVFQAKKRVLEPLGLVEEPVKTAPGKKRPVEHSPVEPDSSSGTGKAGQQPARKRLNFGQTGDADSVPDPQPLGQPPAAPSGLGTNTMATGSGAPMADNNEGADGVGNSSGNWHCDSTWMGDRVITTSTRTWALPTYNNHLYKQISSQSGASNDNHYFGYSTPWGYFDFNRFHCHFSPRDWQRLINNNWGFRPKRLNFKLFNIQVKEVTQNDGTTTIANNLTSTVQVFTDSEYQLPYVLGSAHQGCLPPFPADVFMVPQYGYLTLNNGSQAVGRSSFYCLEYFPSQMLRTGNNFTFSYTFEDVPFHSSYAHSQSLDRLMNPLIDQYLYYLSRTNTPSGTTTQSRLQFSVAGPSNMAVQGRNWLPGPCYRQQRVSKTSADNNNSEFAWTGATKYHLNGRDSLVNPGPAMASHKDDEEKFFPQSGVLIFGKQGSEKTNVDIEKVMITDEEEIRTTNPVATEQYGSVSTNLQQQNTAPATADVNTQGVLPGMVWQDRDVYLQGPIWAKIPHTDGHFHPSPLMGGFGLKHPPPQILIKNTPVPANPSTTFSAAKFASFITQYSTGQVSVEIEWELQKENSKRWNPEIQYTSNYNKSVNVDFTVDTNGVYSEPRPIGTRYLTRNL

SEQ ID NO: 1256 - DNA, 2208 bp, synthetic construct
  misc_feature 1..2208: note = source = /note="Description of Artificial Sequence: Synthetic polynucleotide"
  source 1..2208: mol_type = other DNA
atggctgccgatggttatcttccagattggctcgaggacactctctctgaaggaataagacagtggtggaagctcaaacctggcccaccaccaccaaagcccgcagagcggcataaggacgacagcaggggtcttgtgcttcctgggtacaagtacctcggacccttcaacggactcgacaagggagagccggtcaacgaggcagacgccgcggccctcgagcacgacaaagcctacgaccggcagctcgacagcggagacaacccgtacctcaagtacaaccacgccgacgcggagtttcaggagcgccttaaagaagatacgtcttttgggggcaacctcggacgagcagtcttccaggcgaaaaagaggattcttgaacctctgggcctggttgaggaacctgttaagacggctccgggaaaaaagaggccggtagagcactctcctgcggagccagactcctcctcgggaaccggaaagtcgggccagcagcctgcaagaaaaagattgaattttggtcagactggagacgcagactcagtacctgacccccagcctctcggacagccaccagcagccccctctggtctgggaactaatacgatggcttcaggcagtggcgcaccaatggcagacaataacgagggcgccgacggagtgggtaattcctcgggaaattggcattgcgattccacatggatgggcgacagagtcatcaccaccagcacccgaacctgggccctgcccacctacaacaaccacctctacaaacaaatttccagccaatcaggagcctcgaacgacaatcactactttggctacagcaccccttgggggtattttgacttcaacagattccactgccacttttcaccacgtgactggcaaagactcatcaacaacaactggggattccgacccaagagactcagcttcaagctctttaacattcaagtcaaagaggtcacgcagaatgacggtacgacgacgattgccaataaccttaccagcacggttcaggtgtttactgactcggagtaccagctcccgtacgtcctcggctcggcgcatcaaggatgcctcccgccgttcccagcagacgtcttcatggtgccacagtatggatacctcaccctgaacaacgggagtcaggcagtaggacgctcttcattttactgcctggagtactttccttctcagatgctgcgtaccggaaacaactttaccttcagctacacttttgaggacgttcctttccacagcagctacgctcacagccagagtctggaccgtctcatgaatcctctcatcgaccagtacctgtattacttgagcagaacaaacactccaagtggaaccaccacgatgtcaaggcttcagttttctcaggccggagcgagtgacattcgggaccagtctaggaactggcttcctggaccctgttaccgccagcagcgagtatcaaagacagctgcggataacaacaacagtgattactcgtggactggagctaccaagtaccacctcaatggcagagactctctggtgaatccgggcccggccatggcaagccacaaggacgatgaagaaaagtattttcctcagagcggggttctcatctttgggaagcaagactcaggaaaaacaaatgtggacattgaaaaggtcatgattacagacgaagaggaaatcaggacaaccaatcccgtggctacggagcagtatggttctgtatctaccaacctccagagcggcaacacacaagcagctacctcagatgtcaacacacaaggcgttcttccaggcatggtctggcaggacagagatgtgtaccttcaggggcccatctgggcaaagattccacacacggacggacattttcacccctctcccctcatgggtggattcggacttaaacaccctcctccacagattctcatcaagaacaccccggtacctgcgaatccttcgaccaccttcagtgcggcaaagtttgcttccttcatcacacagtactccacgggacaggtcagcgtggagatcgagtgggagctgcagaaggaaaacagcaaacgctggaatcccgaaattcagtacacttccaactacaacaagtctgttaatgtggactttactgtggacactaatggcgtgtattcagagcctcgccccattggcaccagatacctgactcgtaatctgtaa

SEQ ID NO: 1257 - DNA, 2208 bp, synthetic construct
  misc_feature 1..2208: note = source = /note="Description of Artificial Sequence: Synthetic polynucleotide"
  source 1..2208: mol_type = other DNA
atggctgccgatggttatcttccagattggctcgaggacactctctctgaaggaataagacagtggtggaagctcaaacctggcccaccaccaccaaagcccgcagagcggcataaggacgacagcaggggtcttgtgcttcctgggtacaagtacctcggacccttcaacggactcgacaagggagagccggtcaacgaggcagacgccgcggccctcgagcacgacaaagcctacgaccggcagctcgacagcggagacaacccgtacctcaagtacaaccacgccgacgcggagtttcaggagcgccttaaagaagatacgtcttttgggggcaacctcggacgagcagtcttccaggcgaaaaagaggattcttgaacctctgggcctggttgaggaacctgttaagacggctccgggaaaaaagaggccggtagagcactctcctgcggagccagactcctcctcgggaaccggaaagtcgggccagcagcctgcaagaaaaagattgaattttggtcagactggagacgcagactcagtacctgacccccagcctctcggacagccaccagcagccccctctggtctgggaactaatacgatggcttcaggcagtggcgcaccaatggcagacaataacgagggcgccgacggagtgggtaattcctcgggaaattggcattgcgattccacatggatgggcgacagagtcatcaccaccagcacccgaacctgggccctgcccacctacaacaaccacctctacaaacaaatttccagccaatcaggagcctcgaacgacaatcactactttggctacagcaccccttgggggtattttgacttcaacagattccactgccacttttcaccacgtgactggcaaagactcatcaacaacaactggggattccgacccaagagactcaacttcaagctctttaacattcaagtcaaagaggtcacgcagaatgacggtacgacgacgattgccaataaccttaccagcacggttcaggtgtttactgactcggagtaccagctcccgtacgtcctcggctcggcgcatcaaggatgcctcccgccgttcccagcagacgtcttcatggtgccacagtatggatacctcaccctgaacaacgggagtcaggcagtaggacgctcttcattttactgcctggagtactttccttctcagatgctgcgtaccggaaacaactttaccttcagctacacttttgaggacgttcctttccacagcagctacgctcacagccagagtctggaccgtctcatgaatcctctcatcgaccagtacctgtattacttgagcagaacaaacactccaagtggaaccaccacgatgtcaaggcttcagttttctcaggccggagcgagtgacattcgggaccagtctaggaactggcttcctggaccctgttaccgccagcagcgagtatcaaagacagctgcggataacaacaacagtgattactcgtggactggagctaccaagtaccacctcaatggcagagactctctggtgaatccgggcccggccatggcaagccacaaggacgatgaagaaaagtattttcctcagagcggggttctcatctttgggaagcaagactcaggaaaaacaaatgtggacattgaaaaggtcatgattacagacgaagaggaaatcaggacaaccaatcccgtggctacggagcagtatggttctgtatctaccaacctccagagcggcaacacacaagcagctacctcagatgtcaacacacaaggcgttcttccaggcatggtctggcaggacagagatgtgtaccttcaggggcccatctgggcaaagattccacacacggacggacattttcacccctctcccctcatgggtggattcggacttaaacaccctcctccacagattctcatcaagaacaccccggtacctgcgaatccttcgaccaccttcagtgcggcaaagtttgcttccttcatcacacagtactccacgggacaggtcagcgtggagatcgagtgggagctgcagaaggaaaacagcaaacgctggaatcccgaaattcagtacacttccaactacaacaagtctgttaatgtggactttactgtggacactaatggcgtgtattcagagcctcgccccattggcaccagatacctgactcgtaatctgtaa

SEQ ID NO: 1258 - protein, 735 aa, synthetic construct
  REGION 1..735: note = source = /note="Description of Artificial Sequence: Synthetic polypeptide"
MAADGYLPDWLEDTLSEGIRQWWKLKPGPPPPKPAERHKDDSRGLVLPGYKYLGPFNGLDKGEPVNEADAAALEHDKAYDRQLDSGDNPYLKYNHADAEFQERLKEDTSFGGNLGRAVFQAKKRILEPLGLVEEPVKTAPGKKRPVEHSPAEPDSSSGTGKSGQQPARKRLNFGQTGDADSVPDPQPLGQPPAAPSGLGTNTMASGSGAPMADNNEGADGVGNSSGNWHCDSTWMGDRVITTSTRTWALPTYNNHLYKQISSQSGASNDNHYFGYSTPWGYFDFNRFHCHFSPRDWQRLINNNWGFRPKRLNFKLFNIQVKEVTQNDGTTTIANNLTSTVQVFTDSEYQLPYVLGSAHQGCLPPFPADVFMVPQYGYLTLNNGSQAVGRSSFYCLEYFPSQMLRTGNNFTFSYTFEDVPFHSSYAHSQSLDRLMNPLIDQYLYYLSRTNTPSGTTTMSRLQFSQAGASDIRDQSRNWLPGPCYRQQRVSKTAADNNNSDYSWTGATKYHLNGRDSLVNPGPAMASHKDDEEKYFPQSGVLIFGKQDSGKTNVDIEKVMITDEEEIRTTNPVATEQYGSVSTNLQSGNTQAATSDVNTQGVLPGMVWQDRDVYLQGPIWAKIPHTDGHFHPSPLMGGFGLKHPPPQILIKNTPVPANPSTTFSAAKFASFITQYSTGQVSVEIEWELQKENSKRWNPEIQYTSNYNKSVNVDFTVDTNGVYSEPRPIGTRYLTRNL

SEQ ID NO: 1259 - protein, 736 aa, synthetic construct
  REGION 1..736: note = source = /note="Description of Artificial Sequence: Synthetic polypeptide"
MAADGYLPDWLEDNLSEGIREWWDLKPGAPKPKANQQKQDDGRGLVLPGYKYLGPFNGLDKGEPVNAADAAALEHDKAYDQQLKAGDNPYLRYNHADAEFQERLQEDTSFGGNLGRAVFQAKKRVLEPFGLVEEGAKTAPGKKRPVEQSPQEPDSSSGIGKTGQQPAKKRLNFGQTGDSESVPDPQPLGEPPATPAAVGPTTMASGGGAPMADNNEGADGVGNASGNWHCDSTWLGDRVITTSTRTWALPTYNNHLYKQISSASTGASNDNHYFGYSTPWGYFDFNRFHCHFSPRDWQRLINNNWGFRPKRLNFKLFNIQVKEVTTNDGVTTIANNLTSTVQVFSDSEYQLPYVLGSAHQGCLPPFPADVFMIPQYGYLTLNNGSQAVGRSSFYCLEYFPSQMLRTGNNFTFSYTFEDVPFHSSYAHSQSLDRLMNPLIDQYLYFLNRTQNQSGSAQNKDLLFSRGSPAGMSVQPKNWLPGPCYRQQRVSKTKTDNNNSNFTWTGASKYNLNGRESIINPGTAMASHKDDKDKFFPMSGVMIFGKESAGASNTALDNVMITDEEEIKATNPVATERFGTVAVNLQSSSTDPATGDVHVMGALPGMVWQDRDVYLQGPIWAKIPHTDGHFHPSPLMGGFGLKHPPPQILIKNTPVPANPPAEFSATKFASFITQYSTGQVSVEIEWELQKENSKRWNPEVQYTSNYAKSANVDFTVDNNGLYTEPRPIGTRYLTRPL

SEQ ID NO: 1260 - protein, 747 aa, synthetic construct
  REGION 1..747: note = source = /note="Description of Artificial Sequence: Synthetic polypeptide"
MAADGYLPDWLEDTLSEGIRQWWKLKPGPPPPKPAERHKDDSRGLVLPGYKYLGPFNGLDKGEPVNEADAAALEHDKAYDRQLDSGDNPYLKYNHADAEFQERLKEDTSFGGNLGRAVFQAKKRVLEPLGLVEEPVKTAPGKKRPVEHSPVEPDSSSGTGKAGQQPARKRLNFGQTGDADSVPDPQPLGQPPAAPSGLGTNTMATGSGAPMADNNEGADGVGNSSGNWHCDSTWMGDRVITTSTRTWALPTYNNHLYKQISSQSGASNDNHYFGYSTPWGYFDFNRFHCHFSPRDWQRLINNNWGFRPKRLNFKLFNIQVKEVTQNDGTTTIANNLTSTVQVFTDSEYQLPYVLGSAHQGCLPPFPADVFMVPQYGYLTLNNGSQAVGRSSFYCLEYFPSQMLRTGNNFTFSYTFEDVPFHSSYAHSQSLDRLMNPLIDQYLYYLSRTNTPSGTTTQSRLQFSQAGASDIRDQSRNWLPGPCYRQQRVSKTSADNNNSEYSWTGATKYHLNGRDSLVNPGPAMASHKDDEEKFFPQSGVLIFGKQGSEKTNVDIEKVMITDEEEIRTTNPVATEQYGSVSTNLQRGNAAAGSTPPPMAARQAATADVNTQGVLPGMVWQDRDVYLQGPIWAKIPHTDGHFHPSPLMGGFGLKHPPPQILIKNTPVPANPSTTFSAAKFASFITQYSTGQVSVEIEWELQKENSKRWNPEIQYTSNYNKSVNVDFTVDTNGVYSEPRPIGTRYLTRNL

SEQ ID NO: 1261 - protein, 747 aa, synthetic construct
  REGION 1..747: note = source = /note="Description of Artificial Sequence: Synthetic polypeptide"
MAADGYLPDWLEDTLSEGIRQWWKLKPGPPPPKPAERHKDDSRGLVLPGYKYLGPFNGLDKGEPVNEADAAALEHDKAYDRQLDSGDNPYLKYNHADAEFQERLKEDTSFGGNLGRAVFQAKKRVLEPLGLVEEPVKTAPGKKRPVEHSPVEPDSSSGTGKAGQQPARKRLNFGQTGDADSVPDPQPLGQPPAAPSGLGTNTMATGSGAPMADNNEGADGVGNSSGNWHCDSTWMGDRVITTSTRTWALPTYNNHLYKQISSQSGASNDNHYFGYSTPWGYFDFNRFHCHFSPRDWQRLINNNWGFRPKRLNFKLFNIQVKEVTQNDGTTTIANNLTSTVQVFTDSEYQLPYVLGSAHQGCLPPFPADVFMVPQYGYLTLNNGSQAVGRSSFYCLEYFPSQMLRTGNNFTFSYTFEDVPFHSSYAHSQSLDRLMNPLIDQYLYYLSRTNTPSGTTTQSRLQFSQAGASDIRDQSRNWLPGPCYRQQRVSKTSADNNNSEYSWTGATKYHLNGRDSLVNPGPAMASHKDDEEKFFPQSGVLIFGKQGSEKTNVDIEKVMITDEEEIRTTNPVATEQYGSVSTNLQRGNAAAGETRAPLAARQAATADVNTQGVLPGMVWQDRDVYLQGPIWAKIPHTDGHFHPSPLMGGFGLKHPPPQILIKNTPVPANPSTTFSAAKFASFITQYSTGQVSVEIEWELQKENSKRWNPEIQYTSNYNKSVNVDFTVDTNGVYSEPRPIGTRYLTRNL

SEQ ID NO: 1262 - protein, 7 aa, synthetic construct
  REGION 1..7: note = source = /note="Description of Artificial Sequence: Synthetic peptide"
TLAVPFK

SEQ ID NO: 1263 - protein, 7 aa, synthetic construct
  REGION 1..7: note = source = /note="Description of Artificial Sequence: Synthetic peptide"
KFPVALT

SEQ ID NO: 1264 - protein, 6 aa, synthetic construct
  REGION 1..6: note = source = /note="Description of Artificial Sequence: Synthetic peptide"
LAVPFK

SEQ ID NO: 1265 - protein, 5 aa, synthetic construct
  REGION 1..5: note = source = /note="Description of Artificial Sequence: Synthetic peptide"
AVPFK

SEQ ID NO: 1266 - protein, 4 aa, synthetic construct
  REGION 1..4: note = source = /note="Description of Artificial Sequence: Synthetic peptide"
VPFK

SEQ ID NO: 1267 - protein, 6 aa, synthetic construct
  REGION 1..6: note = source = /note="Description of Artificial Sequence: Synthetic peptide"
TLAVPF

SEQ ID NO: 1268 - protein, 5 aa, synthetic construct
  REGION 1..5: note = source = /note="Description of Artificial Sequence: Synthetic peptide"
TLAVP

SEQ ID NO: 1269 - protein, 4 aa, synthetic construct
  REGION 1..4: note = source = /note="Description of Artificial Sequence: Synthetic peptide"
TLAV

SEQ ID NO: 1270 - protein, 7 aa, synthetic construct
  REGION 1..7: note = source = /note="Description of Artificial Sequence: Synthetic peptide"
SVSKPFL

SEQ ID NO: 1271 - protein, 7 aa, synthetic construct
  REGION 1..7: note = source = /note="Description of Artificial Sequence: Synthetic peptide"
FTLTTPK

SEQ ID NO: 1272 - protein, 7 aa, synthetic construct
  REGION 1..7: note = source = /note="Description of Artificial Sequence: Synthetic peptide"
MNATKNV

SEQ ID NO: 1273 - protein, 7 aa, synthetic construct
  REGION 1..7: note = source = /note="Description of Artificial Sequence: Synthetic peptide"
QSSQTPR

SEQ ID NO: 1274 - protein, 7 aa, synthetic construct
  REGION 1..7: note = source = /note="Description of Artificial Sequence: Synthetic peptide"
ILGTGTS

SEQ ID NO: 1275 - protein, 7 aa, synthetic construct
  REGION 1..7: note = source = /note="Description of Artificial Sequence: Synthetic peptide"
TRTNPEA

SEQ ID NO: 1276 - protein, 7 aa, synthetic construct
  REGION 1..7: note = source = /note="Description of Artificial Sequence: Synthetic peptide"
NGGTSSS

SEQ ID NO: 1277 - protein, 7 aa, synthetic construct
  REGION 1..7: note = source = /note="Description of Artificial Sequence: Synthetic peptide"
YTLSQGW

SEQ ID NO: 1278 - DNA, 21 bp, synthetic construct
  misc_feature 1..21: note = source = /note="Description of Artificial Sequence: Synthetic oligonucleotide"
  source 1..21: mol_type = other DNA
aagtttcctgtggcgttgact

SEQ ID NO: 1279 - DNA, 21 bp, synthetic construct
  misc_feature 1..21: note = source = /note="Description of Artificial Sequence: Synthetic oligonucleotide"
  source 1..21: mol_type = other DNA
actttggcggtgccttttaag

SEQ ID NO: 1280 - DNA, 21 bp, synthetic construct
  misc_feature 1..21: note = source = /note="Description of Artificial Sequence: Synthetic oligonucleotide"
  source 1..21: mol_type = other DNA
agtgtgagtaagccttttttg

SEQ ID NO: 1281 - DNA, 21 bp, synthetic construct
  misc_feature 1..21: note = source = /note="Description of Artificial Sequence: Synthetic oligonucleotide"
  source 1..21: mol_type = other DNA
tttacgttgacgacgcctaag

SEQ ID NO: 1282 - DNA, 21 bp, synthetic construct
  misc_feature 1..21: note = source = /note="Description of Artificial Sequence: Synthetic oligonucleotide"
  source 1..21: mol_type = other DNA
atgaatgctacgaagaatgtg

SEQ ID NO: 1283 - DNA, 21 bp, synthetic construct
  misc_feature 1..21: note = source = /note="Description of Artificial Sequence: Synthetic oligonucleotide"
  source 1..21: mol_type = other DNA
cagtcgtcgcagacgcctagg

SEQ ID NO: 1284 - DNA, 21 bp, synthetic construct
  misc_feature 1..21: note = source = /note="Description of Artificial Sequence: Synthetic oligonucleotide"
  source 1..21: mol_type = other DNA
attctggggactggtacttcg

SEQ ID NO: 1285 - DNA, 21 bp, synthetic construct
  misc_feature 1..21: note = source = /note="Description of Artificial Sequence: Synthetic oligonucleotide"
  source 1..21: mol_type = other DNA
acgcggactaatcctgaggct

SEQ ID NO: 1286 - DNA, 21 bp, synthetic construct
  misc_feature 1..21: note = source = /note="Description of Artificial Sequence: Synthetic oligonucleotide"
  source 1..21: mol_type = other DNA
aatggggggactagtagttct

SEQ ID NO: 1287 - DNA, 21 bp, synthetic construct
  misc_feature 1..21: note = source = /note="Description of Artificial Sequence: Synthetic oligonucleotide"
  source 1..21: mol_type = other DNA
tatactttgtcgcagggttgg

SEQ ID NO: 1288 - protein, 11 aa, synthetic construct
  REGION 1..11: note = source = /note="Description of Artificial Sequence: Synthetic peptide"
AQTLAVPFKAQ

SEQ ID NO: 1289 - protein, 11 aa, synthetic construct
  REGION 1..11: note = source = /note="Description of Artificial Sequence: Synthetic peptide"
AQSVSKPFLAQ

SEQ ID NO: 1290 - protein, 11 aa, synthetic construct
  REGION 1..11: note = source = /note="Description of Artificial Sequence: Synthetic peptide"
AQFTLTTPKAQ

SEQ ID NO: 1291 - protein, 11 aa, synthetic construct
  REGION 1..11: note = source = /note="Description of Artificial Sequence: Synthetic peptide"
DGTLAVPFKAQ

SEQ ID NO: 1292 - protein, 11 aa, synthetic construct
  REGION 1..11: note = source = /note="Description of Artificial Sequence: Synthetic peptide"
ESTLAVPFKAQ

SEQ ID NO: 1293 - protein, 11 aa, synthetic construct
  REGION 1..11: note = source = /note="Description of Artificial Sequence: Synthetic peptide"
GGTLAVPFKAQ

SEQ ID NO: 1294 - protein, 11 aa, synthetic construct
  REGION 1..11: note = source = /note="Description of Artificial Sequence: Synthetic peptide"
AQTLATPFKAQ

SEQ ID NO: 1295 - protein, 11 aa, synthetic construct
  REGION 1..11: note = source = /note="Description of Artificial Sequence: Synthetic peptide"
ATTLATPFKAQ

SEQ ID NO: 1296 - protein, 11 aa, synthetic construct
  REGION 1..11: note = source = /note="Description of Artificial Sequence: Synthetic peptide"
DGTLATPFKAQ

SEQ ID NO: 1297 - protein, 11 aa, synthetic construct
  REGION 1..11: note = source = /note="Description of Artificial Sequence: Synthetic peptide"
GGTLATPFKAQ

SEQ ID NO: 1298 - protein, 11 aa, synthetic construct
  REGION 1..11: note = source = /note="Description of Artificial Sequence: Synthetic peptide"
SGSLAVPFKAQ

SEQ ID NO: 1299 - protein, 11 aa, synthetic construct
  REGION 1..11: note = source = /note="Description of Artificial Sequence: Synthetic peptide"
AQTLAQPFKAQ

SEQ ID NO: 1300 - protein, 11 aa, synthetic construct
  REGION 1..11: note = source = /note="Description of Artificial Sequence: Synthetic peptide"
AQTLQQPFKAQ

SEQ ID NO: 1301 - protein, 11 aa, synthetic construct
  REGION 1..11: note = source = /note="Description of Artificial Sequence: Synthetic peptide"
AQTLSNPFKAQ

SEQ ID NO: 1302 - protein, 11 aa, synthetic construct
  REGION 1..11: note = source = /note="Description of Artificial Sequence: Synthetic peptide"
AQTLAVPFSNP

SEQ ID NO: 1303 - protein, 11 aa, synthetic construct
  REGION 1..11: note = source = /note="Description of Artificial Sequence: Synthetic peptide"
QGTLAVPFKAQ

SEQ ID NO: 1304 - protein, 11 aa, synthetic construct
  REGION 1..11: note = source = /note="Description of Artificial Sequence: Synthetic peptide"
NQTLAVPFKAQ

SEQ ID NO: 1305 - protein, 11 aa, synthetic construct
  REGION 1..11: note = source = /note="Description of Artificial Sequence: Synthetic peptide"
EGSLAVPFKAQ

SEQ ID NO: 1306 - protein, 11 aa, synthetic construct
  REGION 1..11: note = source = /note="Description of Artificial Sequence: Synthetic peptide"
SGNLAVPFKAQ

SEQ ID NO: 1307 - protein, 11 aa, synthetic construct
  REGION 1..11: note = source = /note="Description of Artificial Sequence: Synthetic peptide"
EGTLAVPFKAQ

SEQ ID NO: 1308 - protein, 11 aa, synthetic construct
  REGION 1..11: note = source = /note="Description of Artificial Sequence: Synthetic peptide"
DSTLAVPFKAQ

SEQ ID NO: 1309 - protein, 11 aa, synthetic construct
  REGION 1..11: note = source = /note="Description of Artificial Sequence: Synthetic peptide"
AVTLAVPFKAQ

SEQ ID NO: 1310 - protein, 11 aa, synthetic construct
  REGION 1..11: note = source = /note="Description of Artificial Sequence: Synthetic peptide"
AQTLSTPFKAQ

SEQ ID NO: 1311 - protein, 11 aa, synthetic construct
  REGION 1..11: note = source = /note="Description of Artificial Sequence: Synthetic peptide"
AQTLPQPFKAQ

SEQ ID NO: 1312 - protein, 11 aa, synthetic construct
  REGION 1..11: note = source = /note="Description of Artificial Sequence: Synthetic peptide"
AQTLSQPFKAQ

SEQ ID NO: 1313 - protein, 11 aa, synthetic construct
  REGION 1..11: note = source = /note="Description of Artificial Sequence: Synthetic peptide"
AQTLQLPFKAQ

SEQ ID NO: 1314 - protein, 11 aa, synthetic construct
  REGION 1..11: note = source = /note="Description of Artificial Sequence: Synthetic peptide"
AQTLTMPFKAQ

SEQ ID NO: 1315 - protein, 11 aa, synthetic construct
  REGION 1..11: note = source = /note="Description of Artificial Sequence: Synthetic peptide"
AQTLTTPFKAQ

SEQ ID NO: 1316 - protein, 11 aa, synthetic construct
  REGION 1..11: note = source = /note="Description of Artificial Sequence: Synthetic peptide"
AQYTLSQGWAQ

SEQ ID NO: 1317 - protein, 11 aa, synthetic construct
  REGION 1..11: note = source = /note="Description of Artificial Sequence: Synthetic peptide"
AQMNATKNVAQ

SEQ ID NO: 1318 - protein, 11 aa, synthetic construct
  REGION 1..11: note = source = /note="Description of Artificial Sequence: Synthetic peptide"
AQVSGGHHSAQ

SEQ ID NO: 1319 - protein, 11 aa, synthetic construct
  REGION 1..11: note = source = /note="Description of Artificial Sequence: Synthetic peptide"
AQTLTAPFKAQ

SEQ ID NO: 1320 - protein, 11 aa, synthetic construct
  REGION 1..11: note = source = /note="Description of Artificial Sequence: Synthetic peptide"
AQTLSKPFKAQ

SEQ ID NO: 1321 - protein, 7 aa, synthetic construct
  REGION 1..7: note = source = /note="Description of Artificial Sequence: Synthetic peptide"
QAVRTSL

SEQ ID NO: 1322 - protein, 7 aa, synthetic construct
  REGION 1..7: note = source = /note="Description of Artificial Sequence: Synthetic peptide"
LAKERLS

SEQ ID NO: 1323 - protein, 7 aa, synthetic construct
  REGION 1..7: note = source = /note="Description of Artificial Sequence: Synthetic peptide"
MNSTKNV

SEQ ID NO: 1324 - protein, 7 aa, synthetic construct
  REGION 1..7: note = source = /note="Description of Artificial Sequence: Synthetic peptide"
VSGGHHS

SEQ ID NO: 1325 - protein, 14 aa, synthetic construct
  REGION 1..14: note = source = /note="Description of Artificial Sequence: Synthetic peptide"
SAQTLAVPFKAQAQ

SEQ ID NO: 1326 - protein, 14 aa, synthetic construct
  VARIANT 2..4: note = MOD_RES - Any amino acid
  REGION 1..14: note = source = /note="Description of Artificial Sequence: Synthetic peptide"
SXXXLAVPFKAQAQ

SEQ ID NO: 1327 - protein, 14 aa, synthetic construct
  VARIANT 4..6: note = MOD_RES - Any amino acid
  REGION 1..14: note = source = /note="Description of Artificial Sequence: Synthetic peptide"
SAQXXXVPFKAQAQ

SEQ ID NO: 1328 - protein, 14 aa, synthetic construct
  VARIANT 6..8: note = MOD_RES - Any amino acid
  REGION 1..14: note = source = /note="Description of Artificial Sequence: Synthetic peptide"
SAQTLXXXFKAQAQ

SEQ ID NO: 1329 - protein, 14 aa, synthetic construct
  VARIANT 8..10: note = MOD_RES - Any amino acid
  REGION 1..14: note = source = /note="Description of Artificial Sequence: Synthetic peptide"
SAQTLAVXXXAQAQ

SEQ ID NO: 1330 - protein, 14 aa, synthetic construct
  VARIANT 10..12: note = MOD_RES - Any amino acid
  REGION 1..14: note = source = /note="Description of Artificial Sequence: Synthetic peptide"
SAQTLAVPFXXXAQ

SEQ ID NO: 1331 - protein, 7 aa, synthetic construct
  REGION 1..7: note = source = /note="Description of Artificial Sequence: Synthetic peptide"
TNHQSAQ

SEQ ID NO: 1332 - protein, 7 aa, synthetic construct
  REGION 1..7: note = source = /note="Description of Artificial Sequence: Synthetic peptide"
AQAQTGW

SEQ ID NO: 1333 - protein, 9 aa, synthetic construct
  REGION 1..9: note = source = /note="Description of Artificial Sequence: Synthetic peptide"
DGTLATPFK

SEQ ID NO: 1334 - protein, 11 aa, synthetic construct
  VARIANT 10..11: note = MOD_RES - Any amino acid
  REGION 1..11: note = source = /note="Description of Artificial Sequence: Synthetic peptide"
DGTLATPFKXX

SEQ ID NO: 1335 - protein, 8 aa, synthetic construct
  REGION 1..8: note = source = /note="Description of Artificial Sequence: Synthetic peptide"
LAVPFKAQ

SEQ ID NO: 1336 - protein, 6 aa, synthetic construct
  REGION 1..6: note = source = /note="Description of Artificial Sequence: Synthetic peptide"
VPFKAQ

SEQ ID NO: 1337 - protein, 4 aa, synthetic construct
  REGION 1..4: note = source = /note="Description of Artificial Sequence: Synthetic peptide"
FKAQ

SEQ ID NO: 1338 - protein, 6 aa, synthetic construct
  REGION 1..6: note = source = /note="Description of Artificial Sequence: Synthetic peptide"
AQTLAV

SEQ ID NO: 1339 - protein, 8 aa, synthetic construct
  REGION 1..8: note = source = /note="Description of Artificial Sequence: Synthetic peptide"
AQTLAVPF

SEQ ID NO: 1340 - protein, 4 aa, synthetic construct
  REGION 1..4: note = source = /note="Description of Artificial Sequence: Synthetic peptide"
QAVR

SEQ ID NO: 1341 - protein, 4 aa, synthetic construct
  REGION 1..4: note = source = /note="Description of Artificial Sequence: Synthetic peptide"
AVRT

SEQ ID NO: 1342 - protein, 4 aa, synthetic construct
  REGION 1..4: note = source = /note="Description of Artificial Sequence: Synthetic peptide"
VRTS

SEQ ID NO: 1343 - protein, 4 aa, synthetic construct
  REGION 1..4: note = source = /note="Description of Artificial Sequence: Synthetic peptide"
RTSL

SEQ ID NO: 1344 - protein, 5 aa, synthetic construct
  REGION 1..5: note = source = /note="Description of Artificial Sequence: Synthetic peptide"
QAVRT

SEQ ID NO: 1345 - protein, 5 aa, synthetic construct
  REGION 1..5: note = source = /note="Description of Artificial Sequence: Synthetic peptide"
AVRTS

SEQ ID NO: 1346 - protein, 5 aa, synthetic construct
  REGION 1..5: note = source = /note="Description of Artificial Sequence: Synthetic peptide"
VRTSL

SEQ ID NO: 1347 - protein, 6 aa, synthetic construct
  REGION 1..6: note = source = /note="Description of Artificial Sequence: Synthetic peptide"
QAVRTS

SEQ ID NO: 1348 - protein, 6 aa, synthetic construct
  REGION 1..6: note = source = /note="Description of Artificial Sequence: Synthetic peptide"
AVRTSL

SEQ ID NO: 1349 - DNA, 33 bp, synthetic construct
  misc_feature 1..33: note = source = /note="Description of Artificial Sequence: Synthetic oligonucleotide"
  source 1..33: mol_type = other DNA
gatgggactttggcggtgccttttaaggcacag

SEQ ID NO: 1350 - DNA, 33 bp, synthetic construct
  misc_feature 1..33: note = source = /note="Description of Artificial Sequence: Synthetic oligonucleotide"
  source 1..33: mol_type = other DNA
gatgggacgttggcggtgccttttaaggcacag

SEQ ID NO: 1351 - DNA, 21 bp, synthetic construct
  misc_feature 1..21: note = source = /note="Description of Artificial Sequence: Synthetic oligonucleotide"
  source 1..21: mol_type = other DNA
caggcggttaggacgtctttg

SEQ ID NO: 1352 - DNA, 27 bp, synthetic construct
  misc_feature 1..27: note = source = /note="Description of Artificial Sequence: Synthetic oligonucleotide"
  source 1..27: mol_type = other DNA
caggtcttcacggactcagactatcag

SEQ ID NO: 1353 - DNA, 32 bp, synthetic construct
  misc_feature 1..32: note = source = /note="Description of Artificial Sequence: Synthetic oligonucleotide"
  source 1..32: mol_type = other DNA
caagtaaaacctctacaaatgtggtaaaatcg

SEQ ID NO: 1354 - DNA, 36 bp, synthetic construct
  misc_feature 1..36: note = source = /note="Description of Artificial Sequence: Synthetic oligonucleotide"
  source 1..36: mol_type = other DNA
actcatcgaccaatacttgtactatctctctagaac

SEQ ID NO: 1355 - DNA, 26 bp, synthetic construct
  misc_feature 1..26: note = source = /note="Description of Artificial Sequence: Synthetic oligonucleotide"
  source 1..26: mol_type = other DNA
ggaagtattccttggttttgaaccca

SEQ ID NO: 1356 - DNA, 23 bp, synthetic construct
  misc_feature 1..23: note = source = /note="Description of Artificial Sequence: Synthetic oligonucleotide"
  source 1..23: mol_type = other DNA
ggtcgcggttcttgtttgtggat

SEQ ID NO: 1357 - DNA, 24 bp, synthetic construct
  misc_feature 1..24: note = source = /note="Description of Artificial Sequence: Synthetic oligonucleotide"
  source 1..24: mol_type = other DNA
cgaccttgaagcgcatgaactcct

SEQ ID NO: 1358 - DNA, 83 bp, synthetic construct
  misc_difference 42..43: note = modified_base - a, c, t, or g
  misc_difference 45..46: note = modified_base - a, c, t, or g
  misc_difference 48..49: note = modified_base - a, c, t, or g
  misc_difference 51..52: note = modified_base - a, c, t, or g
  misc_difference 54..55: note = modified_base - a, c, t, or g
  misc_difference 57..58: note = modified_base - a, c, t, or g
  misc_difference 60..61: note = modified_base - a, c, t, or g
  misc_feature 1..83: note = source = /note="Description of Artificial Sequence: Synthetic oligonucleotide"
  source 1..83: mol_type = other DNA
gtattccttggttttgaacccaaccggtctgcgcctgtgcmnnmnnmnnmnnmnnmnnmnnttgggcactctggtggtttgtc

SEQ ID NO: 1359 - DNA, 64 bp, synthetic construct
  misc_difference 36..37: note = modified_base - a, c, t, or g
  misc_difference 39..40: note = modified_base - a, c, t, or g
  misc_difference 42..43: note = modified_base - a, c, t, or g
  misc_feature 1..64: note = source = /note="Description of Artificial Sequence: Synthetic oligonucleotide"
  source 1..64: mol_type = other DNA
gtattccttggttttgaacccaaccggtctgcgcmnnmnnmnnaaaaggcaccgccaaagtttg

SEQ ID NO: 1360 - DNA, 70 bp, synthetic construct
  misc_difference 42..43: note = modified_base - a, c, t, or g
  misc_difference 45..46: note = modified_base - a, c, t, or g
  misc_difference 48..49: note = modified_base - a, c, t, or g
  misc_feature 1..70: note = source = /note="Description of Artificial Sequence: Synthetic oligonucleotide"
  source 1..70: mol_type = other DNA
gtattccttggttttgaacccaaccggtctgcgcctgtgcmnnmnnmnncaccgccaaagtttgggcact

SEQ ID NO: 1361 - DNA, 77 bp, synthetic construct
  misc_difference 48..49: note = modified_base - a, c, t, or g
  misc_difference 51..52: note = modified_base - a, c, t, or g
  misc_difference 54..55: note = modified_base - a, c, t, or g
  misc_feature 1..77: note = source = /note="Description of Artificial Sequence: Synthetic oligonucleotide"
  source 1..77: mol_type = other DNA
gtattccttggttttgaacccaaccggtctgcgcctgtgccttaaamnnmnnmnncaaagtttgggcactctggtgg

SEQ ID NO: 1362 - DNA, 83 bp, synthetic construct
  misc_difference 54..55: note = modified_base - a, c, t, or g
  misc_difference 57..58: note = modified_base - a, c, t, or g
  misc_difference 60..61: note = modified_base - a, c, t, or g
  misc_feature 1..83: note = source = /note="Description of Artificial Sequence: Synthetic oligonucleotide"
  source 1..83: mol_type = other DNA
gtattccttggttttgaacccaaccggtctgcgcctgtgccttaaaaggcacmnnmnnmnnttgggcactctggtggtttgtg

SEQ ID NO: 1363 - DNA, 21 bp, synthetic construct
  misc_feature 1..21: note = source = /note="Description of Artificial Sequence: Synthetic oligonucleotide"
  source 1..21: mol_type = other DNA
cttgcgaaggagcggctttcg

SEQ ID NO: 1364 - protein, 10 aa, synthetic construct
  REGION 1..10: note = source = /note="Description of Artificial Sequence: Synthetic peptide"
VNLTWSRASG

SEQ ID NO: 1365 - protein, 14 aa, synthetic construct
  REGION 1..14: note = source = /note="Description of Artificial Sequence: Synthetic peptide"
EFCINHRGYWVCGD

SEQ ID NO: 1366 - protein, 11 aa, synthetic construct
  REGION 1..11: note = source = /note="Description of Artificial Sequence: Synthetic peptide"
EDGQVMDVDLS

SEQ ID NO: 1367 - protein, 9 aa, synthetic construct
  REGION 1..9: note = source = /note="Description of Artificial Sequence: Synthetic peptide"
EKQRNGTLT

SEQ ID NO: 1368 - protein, 17 aa, synthetic construct
  REGION 1..17: note = source = /note="Description of Artificial Sequence: Synthetic peptide"
TYQCRVTHPHLPRALMR

SEQ ID NO: 1369 - protein, 14 aa, synthetic construct
  REGION 1..14: note = source = /note="Description of Artificial Sequence: Synthetic peptide"
RHSTTQPRKTKGSG

SEQ ID NO: 1370 - protein, 13 aa, synthetic construct
  REGION 1..13: note = source = /note="Description of Artificial Sequence: Synthetic peptide"
DSNPRGVSAYLSR

SEQ ID NO: 1371 - protein, 12 aa, synthetic construct
  REGION 1..12: note = source = /note="Description of Artificial Sequence: Synthetic peptide"
TITCLWDLAPSK

SEQ ID NO: 1372 - protein, 10 aa, synthetic construct
  REGION 1..10: note = source = /note="Description of Artificial Sequence: Synthetic peptide"
KTKGSGFFVF

SEQ ID NO: 1373 - protein, 12 aa, synthetic construct
  REGION 1..12: note = source = /note="Description of Artificial Sequence: Synthetic peptide"
THPHLPRALMRS

SEQ ID NO: 1374 - protein, 23 aa, synthetic construct
  REGION 1..23: note = source = /note="Description of Artificial Sequence: Synthetic peptide"
GETYQCRVTHPHLPRALMRSTTK

SEQ ID NO: 1375 - protein, 8 aa, synthetic construct
  REGION 1..8: note = source = /note="Description of Artificial Sequence: Synthetic peptide"
LPRALMRS

SEQ ID NO: 1376 - protein, 8 aa, synthetic construct
  REGION 1..8: note = source = /note="Description of Artificial Sequence: Synthetic peptide"
INHRGYWV

SEQ ID NO: 1377 - protein, 12 aa, synthetic construct
  REGION 1..12: note = source = /note="Description of Artificial Sequence: Synthetic peptide"
CDAGSVRTNAPD

SEQ ID NO: 1378 - protein, 17 aa, synthetic construct
  REGION 1..17: note = source = /note="Description of Artificial Sequence: Synthetic peptide"
AKAVSNLTESRSESLQS

SEQ ID NO: 1379 - protein, 13 aa, synthetic construct
  REGION 1..13: note = source = /note="Description of Artificial Sequence: Synthetic peptide"
SLTGDEFKKVLET

SEQ ID NO: 1380 - protein, 11 aa, synthetic construct
  REGION 1..11: note = source = /note="Description of Artificial Sequence: Synthetic peptide"
REAVAYRFEED

SEQ ID NO: 1381 - protein, 10 aa, synthetic construct
  REGION 1..10: note = source = /note="Description of Artificial Sequence: Synthetic peptide"
INPEIITLDG

SEQ ID NO: 1382 - protein, 15 aa, synthetic construct
  REGION 1..15: note = source = /note="Description of Artificial Sequence: Synthetic peptide"
DISVTGAPVITATYL

SEQ ID NO: 1383 - protein, 12 aa, synthetic construct
  REGION 1..12: note = source = /note="Description of Artificial Sequence: Synthetic peptide"
DISVTGAPVITA

SEQ ID NO: 1384 - protein, 17 aa, synthetic construct
  REGION 1..17: note = source = /note="Description of Artificial Sequence: Synthetic peptide"
PKTVSNLTESSSESVQS

SEQ ID NO: 1385 - protein, 13 aa, synthetic construct
  REGION 1..13: note = source = /note="Description of Artificial Sequence: Synthetic peptide"
SLMGDEFKAVLET

SEQ ID NO: 1386 - protein, 11 aa, synthetic construct
  REGION 1..11: note = source = /note="Description of Artificial Sequence: Synthetic peptide"
QHSVAYTFEED

SEQ ID NO: 1387 - protein, 10 aa, synthetic construct
  REGION 1..10: note = source = /note="Description of Artificial Sequence: Synthetic peptide"
INPEIITRDG

SEQ ID NO: 1388 - protein, 15 aa, synthetic construct
  REGION 1..15: note = source = /note="Description of Artificial Sequence: Synthetic peptide"
DISLTGDPVITASYL

SEQ ID NO: 1389 - protein, 12 aa, synthetic construct
  REGION 1..12: note = source = /note="Description of Artificial Sequence: Synthetic peptide"
DISLTGDPVITA

SEQ ID NO: 1390 - protein, 11 aa, synthetic construct
  REGION 1..11: note = source = /note="Description of Artificial Sequence: Synthetic peptide"
DQSIDFEIDSA

SEQ ID NO: 1391 - protein, 20 aa, synthetic construct
  REGION 1..20: note = source = /note="Description of Artificial Sequence: Synthetic peptide"
KNVSEDLPLPTFSPTLLGDS

SEQ ID NO: 1392 - protein, 11 aa, synthetic construct
  REGION 1..11: note = source = /note="Description of Artificial Sequence: Synthetic peptide"
KNVSEDLPLPT

SEQ ID NO: 1393 - protein, 12 aa, synthetic construct
  REGION 1..12: note = source = /note="Description of Artificial Sequence: Synthetic peptide"
CDSGRVRTDAPD

SEQ ID NO: 1394 - protein, 14 aa, synthetic construct
  REGION 1..14: note = source = /note="Description of Artificial Sequence: Synthetic peptide"
FPEHLLVDFLQSLS

SEQ ID NO: 1395 - protein, 9 aa, synthetic construct
  REGION 1..9: note = source = /note="Description of Artificial Sequence: Synthetic peptide"
DAEFRHDSG

SEQ ID NO: 1396 - protein, 16 aa, synthetic construct
  REGION 1..16: note = source = /note="Description of Artificial Sequence: Synthetic peptide"
HYAAAQWDFGNTMCQL

SEQ ID NO: 1397 - protein, 13 aa, synthetic construct
  REGION 1..13: note = source = /note="Description of Artificial Sequence: Synthetic peptide"
YAAQWDFGNTMCQ

SEQ ID NO: 1398 - protein, 10 aa, synthetic construct
  REGION 1..10: note = source = /note="Description of Artificial Sequence: Synthetic peptide"
RSQKEGLHYT

SEQ ID NO: 1399 - protein, 19 aa, synthetic construct
  REGION 1..19: note = source = /note="Description of Artificial Sequence: Synthetic peptide"
SSRTPSDKPVAHWANPQAE

SEQ ID NO: 1400 - protein, 15 aa, synthetic construct
  REGION 1..15: note = source = /note="Description of Artificial Sequence: Synthetic peptide"
SRTPSDKPVAHWANP

SEQ ID NO: 1401 - protein, 9 aa, synthetic construct
  REGION 1..9: note = source = /note="Description of Artificial Sequence: Synthetic peptide"
SSRTPSDKP

SEQ ID NO: 1402 - protein, 14 aa, synthetic construct
  REGION 1..14: note = source = /note="Description of Artificial Sequence: Synthetic peptide"
NADGNVDYHMNSVP

SEQ ID NO: 1403 - protein, 11 aa, synthetic construct
  REGION 1..11: note = source = /note="Description of Artificial Sequence: Synthetic peptide"
DGNVDYHMNSV

SEQ ID NO: 1404 - protein, 16 aa, synthetic construct
  REGION 1..16: note = source = /note="Description of Artificial Sequence: Synthetic peptide"
RSFKEFLQSSLRALRQ

SEQ ID NO: 1405 - protein, 11 aa, synthetic construct
  REGION 1..11: note = source = /note="Description of Artificial Sequence: Synthetic peptide"
FKEFLQSSLRA

SEQ ID NO: 1406 - protein, 10 aa, synthetic construct
  REGION 1..10: note = source = /note="Description of Artificial Sequence: Synthetic peptide"
QMWAPQWGPD

SEQ ID NO: 1407 - protein, 6 aa, synthetic construct
  REGION 1..6: note = source = /note="Description of Artificial Sequence: Synthetic peptide"
RGNRQA

SEQ ID NO: 1408 - protein, 6 aa, synthetic construct
  REGION 1..6: note = source = /note="Description of Artificial Sequence: Synthetic peptide"
SSSTDP

SEQ ID NO: 1409 - protein, 6 aa, synthetic construct
  REGION 1..6: note = source = /note="Description of Artificial Sequence: Synthetic peptide"
SSNTAP

SEQ ID NO: 1410 - protein, 6 aa, synthetic construct
  REGION 1..6: note = source = /note="Description of Artificial Sequence: Synthetic peptide"
SNSNLP

SEQ ID NO: 1411 - protein, 6 aa, synthetic construct
  REGION 1..6: note = source = /note="Description of Artificial Sequence: Synthetic peptide"
SSTTAP

SEQ ID NO: 1412 - protein, 6 aa, synthetic construct
  REGION 1..6: note = source = /note="Description of Artificial Sequence: Synthetic peptide"
AANTAA

SEQ ID NO: 1413 - protein, 6 aa, synthetic construct
  REGION 1..6: note = source = /note="Description of Artificial Sequence: Synthetic peptide"
QQNTAP

SEQ ID NO: 1414 - protein, 6 aa, synthetic construct
  REGION 1..6: note = source = /note="Description of Artificial Sequence: Synthetic peptide"
SAQAQA

SEQ ID NO: 1415 - protein, 6 aa, synthetic construct
  REGION 1..6: note = source = /note="Description of Artificial Sequence: Synthetic peptide"
QANTGP

SEQ ID NO: 1416 - protein, 6 aa, synthetic construct
  REGION 1..6: note = source = /note="Description of Artificial Sequence: Synthetic peptide"
NATTAP

SEQ ID NO: 1417 - protein, 6 aa, synthetic construct
  REGION 1..6: note = source = /note="Description of Artificial Sequence: Synthetic peptide"
SSTAGP

SEQ ID NO: 1418 - protein, 6 aa, synthetic construct
  REGION 1..6: note = source = /note="Description of Artificial Sequence: Synthetic peptide"
QQNTAA

SEQ ID NO: 1419 - protein, 6 aa, synthetic construct
  REGION 1..6: note = source = /note="Description of Artificial Sequence: Synthetic peptide"
PSTAGP

SEQ ID NO: 1420 - protein, 6 aa, synthetic construct
  REGION 1..6: note = source = /note="Description of Artificial Sequence: Synthetic peptide"
NQNTAP

SEQ ID NO: 1421 - protein, 6 aa, synthetic construct
  REGION 1..6: note = source = /note="Description of Artificial Sequence: Synthetic peptide"
QAANAP

SEQ ID NO: 1422 - protein, 6 aa, synthetic construct
  REGION 1..6: note = source = /note="Description of Artificial Sequence: Synthetic peptide"
SIVGLP

SEQ ID NO: 1423 - protein, 6 aa, synthetic construct
  REGION 1..6: note = source = /note="Description of Artificial Sequence: Synthetic peptide"
AASTAA

SEQ ID NO: 1424 - protein, 6 aa, synthetic construct
  REGION 1..6: note = source = /note="Description of Artificial Sequence: Synthetic peptide"
SQNTTA

SEQ ID NO: 1425 - protein, 6 aa, synthetic construct
  REGION 1..6: note = source = /note="Description of Artificial Sequence: Synthetic peptide"
QQDTAP

SEQ ID NO: 1426 - protein, 6 aa, synthetic construct
  REGION 1..6: note = source = /note="Description of Artificial Sequence: Synthetic peptide"
QTNTGP

SEQ ID NO: 1427 - protein, 6 aa, synthetic construct
  REGION 1..6: note = source = /note="Description of Artificial Sequence: Synthetic peptide"
QTNGAP

SEQ ID NO: 1428 - protein, 6 aa, synthetic construct
  REGION 1..6: note = source = /note="Description of Artificial Sequence: Synthetic peptide"
QQNAAP

SEQ ID NO: 1429 - protein, 6 aa, synthetic construct
  REGION 1..6: note = source = /note="Description of Artificial Sequence: Synthetic peptide"
AANTQA

SEQ ID NO: 1430 - protein, 6 aa, synthetic construct
  REGION 1..6: note = source = /note="Description of Artificial Sequence: Synthetic peptide"
NGRAHA

SEQ ID NO: 1431 - protein, 7 aa, synthetic construct
  REGION 1..7: note = source = /note="Description of Artificial Sequence: Synthetic peptide"
QPEHSST

SEQ ID NO: 1432 - protein, 7 aa, synthetic construct
  REGION 1..7: note = source = /note="Description of Artificial Sequence: Synthetic peptide"
VNTANST

SEQ ID NO: 1433 - protein, 7 aa, synthetic construct
  REGION 1..7: note = source = /note="Description of Artificial Sequence: Synthetic peptide"
HGPMQKS

SEQ ID NO: 1434 - protein, 7 aa, synthetic construct
  REGION 1..7: note = source = /note="Description of Artificial Sequence: Synthetic peptide"
PHKPPLA

SEQ ID NO: 1435 - protein, 7 aa, synthetic construct
  REGION 1..7: note = source = /note="Description of Artificial Sequence: Synthetic peptide"
IKNNEMW

SEQ ID NO: 1436 - protein, 7 aa, synthetic construct
  REGION 1..7: note = source = /note="Description of Artificial Sequence: Synthetic peptide"
RNLDTPM

SEQ ID NO: 1437 - protein, 7 aa, synthetic construct
  REGION 1..7: note = source = /note="Description of Artificial Sequence: Synthetic peptide"
VDSHRQS

SEQ ID NO: 1438 - protein, 7 aa, synthetic construct
  REGION 1..7: note = source = /note="Description of Artificial Sequence: Synthetic peptide"
YDSKTKT

SEQ ID NO: 1439 - protein, 7 aa, synthetic construct
  REGION 1..7: note = source = /note="Description of Artificial Sequence: Synthetic peptide"
SQLPHQK

SEQ ID NO: 1440 - protein, 7 aa, synthetic construct
  REGION 1..7: note = source = /note="Description of Artificial Sequence: Synthetic peptide"
STMQQNT

SEQ ID NO: 1441 - protein, 7 aa, synthetic construct
  REGION 1..7: note = source = /note="Description of Artificial Sequence: Synthetic peptide"
TERYMTQ

SEQ ID NO: 1442 - protein, 7 aa, synthetic construct
  REGION 1..7: note = source = /note="Description of Artificial Sequence: Synthetic peptide"
DASLSTS

SEQ ID NO: 1443 - protein, 7 aa, synthetic construct
  REGION 1..7: note = source = /note="Description of Artificial Sequence: Synthetic peptide"
DLPNKKT

SEQ ID NO: 1444 - protein, 7 aa, synthetic construct
  REGION 1..7: note = source = /note="Description of Artificial Sequence: Synthetic peptide"
DLTAARL

SEQ ID NO: 1445 - protein, 7 aa, synthetic construct
  REGION 1..7: note = source = /note="Description of Artificial Sequence: Synthetic peptide"
EPHQFNY

SEQ ID NO: 1446 - protein, 7 aa, synthetic construct
  REGION 1..7: note = source = /note="Description of Artificial Sequence: Synthetic peptide"
EPQSNHT

SEQ ID NO: 1447 - protein, 7 aa, synthetic construct
  REGION 1..7: note = source = /note="Description of Artificial Sequence: Synthetic peptide"
MSSWPSQ

SEQ ID NO: 1448 - protein, 7 aa, synthetic construct
  REGION 1..7: note = source = /note="Description of Artificial Sequence: Synthetic peptide"
NPKHNAT

SEQ ID NO: 1449 - protein, 7 aa, synthetic construct
  REGION 1..7: note = source = /note="Description of Artificial Sequence: Synthetic peptide"
PDGMRTT

SEQ ID NO: 1450 - protein, 7 aa, synthetic construct
  REGION 1..7: note = source = /note="Description of Artificial Sequence: Synthetic peptide"
PNNNKTT

SEQ ID NO: 1451 - protein, 7 aa, synthetic construct
  REGION 1..7: note = source = /note="Description of Artificial Sequence: Synthetic peptide"
QSTTHDS

SEQ ID NO: 1452 - protein, 7 aa, synthetic construct
  REGION 1..7: note = source = /note="Description of Artificial Sequence: Synthetic peptide"
TGSKQKQ

SEQ ID NO: 1453 - protein, 7 aa, synthetic construct
  REGION 1..7: note = source = /note="Description of Artificial Sequence: Synthetic peptide"
SLKHQAL

SEQ ID NO: 1454 - protein, 7 aa, synthetic construct
  REGION 1..7: note = source = /note="Description of Artificial Sequence: Synthetic peptide"
SPIDGEQ

SEQ ID NO: 1455 - protein, 8 aa, synthetic construct
  REGION 1..8: note = source = /note="Description of Artificial Sequence: Synthetic peptide"
WIFPWIQL

SEQ ID NO: 1456 - protein, 9 aa, synthetic construct
  REGION 1..9: note = source = /note="Description of Artificial Sequence: Synthetic peptide"
CDCRGDCFC

SEQ ID NO: 1457 - protein, 5 aa, synthetic construct
  REGION 1..5: note = source = /note="Description of Artificial Sequence: Synthetic peptide"
CNGRC

SEQ ID NO: 1458 - protein, 7 aa, synthetic construct
  REGION 1..7: note = source = /note="Description of Artificial Sequence: Synthetic peptide"
CPRECES

SEQ ID NO: 1459 - protein, 10 aa, synthetic construct
  REGION 1..10: note = source = /note="Description of Artificial Sequence: Synthetic peptide"
CTTHWGFTLC

SEQ ID NO: 1460 - protein, 9 aa, synthetic construct
  REGION 1..9: note = source = /note="Description of Artificial Sequence: Synthetic peptide"
CGRRAGGSC

SEQ ID NO: 1461 - protein, 9 aa, synthetic construct
  REGION 1..9: note = source = /note="Description of Artificial Sequence: Synthetic peptide"
CKGGRAKDC

SEQ ID NO: 1462 - protein, 9 aa, synthetic construct
  REGION 1..9: note = source = /note="Description of Artificial Sequence: Synthetic peptide"
CVPELGHEC

SEQ ID NO: 1463 - protein, 9 aa, synthetic construct
  REGION 1..9: note = source = /note="Description of Artificial Sequence: Synthetic peptide"
CRRETAWAK

SEQ ID NO: 1464 - protein, 14 aa, synthetic construct
  REGION 1..14: note = source = /note="Description of Artificial Sequence: Synthetic peptide"
VSWFSHRYSPFAVS

SEQ ID NO: 1465 - protein, 13 aa, synthetic construct
  REGION 1..13: note = source = /note="Description of Artificial Sequence: Synthetic peptide"
GYRDGYAGPILYN

SEQ ID NO: 1466 - skipped

SEQ ID NO: 1467 - protein, 4 aa, synthetic construct
  VARIANT 2: note = /replace="Met" - can be Met
  REGION 1..4: note = SITE - /note="Variant residues given in the sequence have no preference with respect to those in the annotations for variant positions"
  REGION 1..4: note = source = /note="Description of Artificial Sequence: Synthetic peptide"
YENW

SEQ ID NO: 1468 - protein, 7 aa, synthetic construct
  REGION 1..7: note = source = /note="Description of Artificial Sequence: Synthetic peptide"
RPLPPLP

SEQ ID NO: 1469 - protein, 7 aa, synthetic construct
  REGION 1..7: note = source = /note="Description of Artificial Sequence: Synthetic peptide"
APPLPPR

SEQ ID NO: 1470 - protein, 12 aa, synthetic construct
  REGION 1..12: note = source = /note="Description of Artificial Sequence: Synthetic peptide"
DVFYPYPYASGS

SEQ ID NO: 1471 - protein, 6 aa, synthetic construct
  REGION 1..6: note = source = /note="Description of Artificial Sequence: Synthetic peptide"
MYWYPY

SEQ ID NO: 1472 - protein, 12 aa, synthetic construct
  REGION 1..12: note = source = /note="Description of Artificial Sequence: Synthetic peptide"
DITWDQLWDLMK

SEQ ID NO: 1473 - protein, 8 aa, synthetic construct
  VARIANT 5: note = /replace="Leu
  REGION 1..8: note = SITE - /note="Variant residues given in the sequence have no preference with respect to those in the annotations for variant positions"
  REGION 1..8: note = source = /note="Description of Artificial Sequence: Synthetic peptide"
CWDDGWLC

SEQ ID NO: 1474 - protein, 14 aa, synthetic construct
  REGION 1..14: note = source = /note="Description of Artificial Sequence: Synthetic peptide"
EWCEYLGGYLRCYA

SEQ ID NO: 1475 - protein, 14 aa, synthetic construct
  VARIANT 2: note = MOD_RES - Any amino acid
  VARIANT 4..5: note = MOD_RES - Any amino acid
  VARIANT 8: note = MOD_RES - Any amino acid
  VARIANT 11: note = MOD_RES - Any amino acid
  VARIANT 13: note = MOD_RES - Any amino acid
  REGION 1..14: note = source = /note="Description of Artificial Sequence: Synthetic peptide"
YXCXXGPXTWXCXP

SEQ ID NO: 1476 - protein, 14 aa, synthetic construct
  REGION 1..14: note = source = /note="Description of Artificial Sequence: Synthetic peptide"
IEGPTLRQWLAARA

SEQ ID NO: 1477 - skipped

SEQ ID NO: 1478 - protein, 7 aa, synthetic construct
  VARIANT 1: note = MOD_RES - Any amino acid
  VARIANT 3..4: note = MOD_RES - Any amino acid
  REGION 1..7: note = source = /note="Description of Artificial Sequence: Synthetic peptide"
XFXXYLW

SEQ ID NO: 1479 - protein, 13 aa, synthetic construct
  REGION 1..13: note = source = /note="Description of Artificial Sequence: Synthetic peptide"
SSIISHFRWGLCD

SEQ ID NO: 1480 - protein, 13 aa, synthetic construct
  REGION 1..13: note = source = /note="Description of Artificial Sequence: Synthetic peptide"
MSRPACPPNDKYE

SEQ ID NO: 1481 - protein, 8 aa, synthetic construct
  REGION 1..8: note = source = /note="Description of Artificial Sequence: Synthetic peptide"
CLRSGRGC

SEQ ID NO: 1482 - protein, 9 aa, synthetic construct
  REGION 1..9: note = source = /note="Description of Artificial Sequence: Synthetic peptide"
CHWMFSPWC

SEQ ID NO: 1483 - skipped

SEQ ID NO: 1484 - protein, 8 aa, synthetic construct
  REGION 1..8: note = source = /note="Description of Artificial Sequence: Synthetic peptide"
CSSRLDAC

SEQ ID NO: 1485 - protein, 7 aa, synthetic construct
  REGION 1..7: note = source = /note="Description of Artificial Sequence: Synthetic peptide"
CLPVASC

SEQ ID NO: 1486 - protein, 13 aa, synthetic construct
  REGION 1..13: note = source = /note="Description of Artificial Sequence: Synthetic peptide"
CGFECVRQCPERC

SEQ ID NO: 1487 - protein, 13 aa, synthetic construct
  REGION 1..13: note = source = /note="Description of Artificial Sequence: Synthetic peptide"
CVALCREACGEGC

SEQ ID NO: 1488 - protein, 9 aa, synthetic construct
  REGION 1..9: note = source = /note="Description of Artificial Sequence: Synthetic peptide"
SWCEPGWCR

SEQ ID NO: 1489 - protein, 7 aa, synthetic construct
  REGION 1..7: note = source = /note="Description of Artificial Sequence: Synthetic peptide"
YSGKWGW

SEQ ID NO: 1490 - protein, 7 aa, synthetic construct
  REGION 1..7: note = source = /note="Description of Artificial Sequence: Synthetic peptide"
GLSGGRS

SEQ ID NO: 1491 - protein, 7 aa, synthetic construct
  REGION 1..7: note = source = /note="Description of Artificial Sequence: Synthetic peptide"
LMLPRAD

SEQ ID NO: 1492 - protein, 9 aa, synthetic construct
  REGION 1..9: note = source = /note="Description of Artificial Sequence: Synthetic peptide"
CSCFRDVCC

SEQ ID NO: 1493 - protein, 9 aa, synthetic construct
  REGION 1..9: note = source = /note="Description of Artificial Sequence: Synthetic peptide"
CRDVVSVIC

SEQ ID NO: 1494 - protein, 6 aa, synthetic construct
  REGION 1..6: note = source = /note="Description of Artificial Sequence: Synthetic peptide"
MARSGL

SEQ ID NO: 1495 - protein, 6 aa, synthetic construct
  REGION 1..6: note = source = /note="Description of Artificial Sequence: Synthetic peptide"
MARAKE

SEQ ID NO: 1496 - protein, 6 aa, synthetic construct
  REGION 1..6: note = source = /note="Description of Artificial Sequence: Synthetic peptide"
MSRTMS

SEQ ID NO: 1497 - protein, 6 aa, synthetic construct
  REGION 1..6: note = source = /note="Description of Artificial Sequence: Synthetic peptide"
KCCYSL

SEQ ID NO: 1498 - protein, 14 aa, synthetic construct
  REGION 1..14: note = source = /note="Description of Artificial Sequence: Synthetic peptide"
MYWGDSHWLQYWYE

SEQ ID NO: 1499 - protein, 7 aa, synthetic construct
  REGION 1..7: note = source = /note="Description of Artificial Sequence: Synthetic peptide"
MQLPLAT

SEQ ID NO: 1500 - protein, 4 aa, synthetic construct
  REGION 1..4: note = source = /note="Description of Artificial Sequence: Synthetic peptide"
EWLS

SEQ ID NO: 1501 - protein, 4 aa, synthetic construct
  REGION 1..4: note = source = /note="Description of Artificial Sequence: Synthetic peptide"
SNEW

SEQ ID NO: 1502 - protein, 4 aa, synthetic construct
  REGION 1..4: note = source = /note="Description of Artificial Sequence: Synthetic peptide"
TNYL

SEQ ID NO: 1503 - protein, 12 aa, synthetic construct
  REGION 1..12: note = source = /note="Description of Artificial Sequence: Synthetic peptide"
WDLAWMFRLPVG

SEQ ID NO: 1504 - protein, 13 aa, synthetic construct
  REGION 1..13: note = source = /note="Description of Artificial Sequence: Synthetic peptide"
CTVALPGGYVRVC

SEQ ID NO: 1505 - protein, 13 aa, synthetic construct
  REGION 1..13: note = source = /note="Description of Artificial Sequence: Synthetic peptide"
CVAYCIEHHCWTC

SEQ ID NO: 1506 - protein, 12 aa, synthetic construct
  REGION 1..12: note = source = /note="Description of Artificial Sequence: Synthetic peptide"
CVFAHNYDYLVC

SEQ ID NO: 1507 - protein, 10 aa, synthetic construct
  REGION 1..10: note = source = /note="Description of Artificial Sequence: Synthetic peptide"
CVFTSNYAFC

SEQ ID NO: 1508 - protein, 7 aa, synthetic construct
  REGION 1..7: note = source = /note="Description of Artificial Sequence: Synthetic peptide"
VHSPNKK

SEQ ID NO: 1509 - protein, 7 aa, synthetic construct
  REGION 1..7: note = source = /note="Description of Artificial Sequence: Synthetic peptide"
CRGDGWC

SEQ ID NO: 1510 - protein, 6 aa, synthetic construct
  VARIANT 1: note = MOD_RES - Any amino acid
  VARIANT 6: note = MOD_RES - Any amino acid
  REGION 1..6: note = source = /note="Description of Artificial Sequence: Synthetic peptide"
XRGCDX

SEQ ID NO: 1511 - skipped

SEQ ID NO: 1512 - protein, 11 aa, synthetic construct
  REGION 1..11: note = source = /note="Description of Artificial Sequence: Synthetic peptide"
SGKGPRQITAL

SEQ ID NO: 1513 - protein, 14 aa, synthetic construct
  VARIANT 10: note = /replace="Gln" - can be Gln
  VARIANT 11: note = /replace="Ala" - can be Ala
  VARIANT 12: note = /replace="Tyr" - can be Tyr
  VARIANT 13: note = /replace="Val" or "Met" or "Arg" - can be Val" or "Met" or "Arg
  VARIANT 14: note = /replace="Lys
  REGION 1..14: note = SITE - /note="Variant residues given in the sequence have no preference with respect to those in the annotations for variant positions"
  REGION 1..14: note = source = /note="Description of Artificial Sequence: Synthetic peptide"
AAAAAAAAAANLTR

SEQ ID NO: 1514 - protein, 6 aa, synthetic construct
  REGION 1..6: note = source = /note="Description of Artificial Sequence: Synthetic peptide"
VYMSPF

SEQ ID NO: 1515 - protein, 7 aa, synthetic construct
  REGION 1..7: note = source = /note="Description of Artificial Sequence: Synthetic peptide"
ATWLPPR

SEQ ID NO: 1516 - protein, 12 aa, synthetic construct
  REGION 1..12: note = source = /note="Description of Artificial Sequence: Synthetic peptide"
HTMYYHHYQHHL

SEQ ID NO: 1517 - protein, 19 aa, synthetic construct
  REGION 1..19: note = source = /note="Description of Artificial Sequence: Synthetic peptide"
SEVGCRAGPLQWLCEKYFG

SEQ ID NO: 1518 - protein, 18 aa, synthetic construct
  REGION 1..18: note = source = /note="Description of Artificial Sequence: Synthetic peptide"
CGLLPVGRPDRNVWRWLC

SEQ ID NO: 1519 - protein, 15 aa, synthetic construct
  REGION 1..15: note = source = /note="Description of Artificial Sequence: Synthetic peptide"
CKGQCDRFKGLPWEC

SEQ ID NO: 1520 - protein, 5 aa, synthetic construct
  REGION 1..5: note = source = /note="Description of Artificial Sequence: Synthetic peptide"
SGRSA

SEQ ID NO: 1521 - protein, 4 aa, synthetic construct
  REGION 1..4: note = source = /note="Description of Artificial Sequence: Synthetic peptide"
WGFP

SEQ ID NO: 1522 - protein, 17 aa, synthetic construct
  REGION 1..17: note = source = /note="Description of Artificial Sequence: Synthetic peptide"
AEPMPHSLNFSQYLWYT

SEQ ID NO: 1523 - protein, 6 aa, synthetic construct
  VARIANT 4: note = /replace="Phe
  REGION 1..6: note = SITE - /note="Variant residues given in the sequence have no preference with respect to those in the annotations for variant positions"
  REGION 1..6: note = source = /note="Description of Artificial Sequence: Synthetic peptide"
WAYWSP

SEQ ID NO: 1524 - protein, 7 aa, synthetic construct
  REGION 1..7: note = source = /note="Description of Artificial Sequence: Synthetic peptide"
IELLQAR

SEQ ID NO: 1525 - protein, 16 aa, synthetic construct
  REGION 1..16: note = source = /note="Description of Artificial Sequence: Synthetic peptide"
AYTKCSRQWRTCMTTH

SEQ ID NO: 1526 - protein, 15 aa, synthetic construct
  REGION 1..15: note = source = /note="Description of Artificial Sequence: Synthetic peptide"
PQNSKIPGPTFLDPH

SEQ ID NO: 1527 - protein, 15 aa, synthetic construct
  REGION 1..15: note = source = /note="Description of Artificial Sequence: Synthetic peptide"
SMEPALPDWWWKMFK

SEQ ID NO: 1528 - protein, 16 aa, synthetic construct
  REGION 1..16: note = source = /note="Description of Artificial Sequence: Synthetic peptide"
ANTPCGPYTHDCPVKR

SEQ ID NO: 1529 - protein, 12 aa, synthetic construct
  REGION 1..12: note = source = /note="Description of Artificial Sequence: Synthetic peptide"
TACHQHVRMVRP

SEQ ID NO: 1530 - protein, 12 aa, synthetic construct
  REGION 1..12: note = source = /note="Description of Artificial Sequence: Synthetic peptide"
VPWMEPAYQRFL

SEQ ID NO: 1531 - protein, 8 aa, synthetic construct
  REGION 1..8: note = source = /note="Description of Artificial Sequence: Synthetic peptide"
DPRATPGS

SEQ ID NO: 1532 - protein, 12 aa, synthetic construct
  REGION 1..12: note = source = /note="Description of Artificial Sequence: Synthetic peptide"
FRPNRAQDYNTN

SEQ ID NO: 1533 - protein, 9 aa, synthetic construct
  REGION 1..9: note = source = /note="Description of Artificial Sequence: Synthetic peptide"
CTKNSYLMC

SEQ ID NO: 1534 - protein, 11 aa, synthetic construct
  VARIANT 2: note = /replace="Arg" - can be Arg
  VARIANT 3: note = /replace="Arg" - can be Arg
  VARIANT 5: note = /replace="Asn" - can be Asn
  VARIANT 6..7: note = MOD_RES - Any amino acid
  VARIANT 9: note = /replace="Val
  REGION 1..11: note = SITE - /note="Variant residues given in the sequence have no preference with respect to those in the annotations for variant positions"
  REGION 1..11: note = source = /note="Description of Artificial Sequence: Synthetic peptide"
CQLTGXXGAGC

SEQ ID NO: 1535 - protein, 9 aa, synthetic construct
  REGION 1..9: note = source = /note="Description of Artificial Sequence: Synthetic peptide"
CPIEDRPMC

SEQ ID NO: 1536 - protein, 12 aa, synthetic construct
  REGION 1..12: note = source = /note="Description of Artificial Sequence: Synthetic peptide"
HEWSYLAPYPWF

SEQ ID NO: 1537 - protein, 9 aa, synthetic construct
  REGION 1..9: note = source = /note="Description of Artificial Sequence: Synthetic peptide"
MCPKHPLGC

SEQ ID NO: 1538 - protein, 15 aa, synthetic construct
  REGION 1..15: note = source = /note="Description of Artificial Sequence: Synthetic peptide"
RMWPSSTVNLSAGRR

SEQ ID NO: 1539 - protein, 20 aa, synthetic construct
  REGION 1..20: note = source = /note="Description of Artificial Sequence: Synthetic peptide"
SAKTAVSQRVWLPSHRGGEP

SEQ ID NO: 1540 - protein, 20 aa, synthetic construct
  REGION 1..20: note = source = /note="Description of Artificial Sequence: Synthetic peptide"
KSREHVNNSACPSKRITAAL

SEQ ID NO: 1541 - protein, 4 aa, synthetic construct
  REGION 1..4: note = source = /note="Description of Artificial Sequence: Synthetic peptide"
EGFR

SEQ ID NO: 1542 - protein, 6 aa, synthetic construct
  REGION 1..6: note = source = /note="Description of Artificial Sequence: Synthetic peptide"
AGLGVR

SEQ ID NO: 1543 - protein, 15 aa, synthetic construct
  REGION 1..15: note = source = /note="Description of Artificial Sequence: Synthetic peptide"
GTRQGHTMRLGVSDG

SEQ ID NO: 1544 - protein, 15 aa, synthetic construct
  REGION 1..15: note = source = /note="Description of Artificial Sequence: Synthetic peptide"
IAGLATPGWSHWLAL

SEQ ID NO: 1545 - protein, 7 aa, synthetic construct
  REGION 1..7: note = source = /note="Description of Artificial Sequence: Synthetic peptide"
SMSIARL

SEQ ID NO: 1546 - protein, 7 aa, synthetic construct
  REGION 1..7: note = source = /note="Description of Artificial Sequence: Synthetic peptide"
HTFEPGV

SEQ ID NO: 1547 - protein, 15 aa, synthetic construct
  REGION 1..15: note = source = /note="Description of Artificial Sequence: Synthetic peptide"
NTSLKRISNKRIRRK

SEQ ID NO: 1548 - protein, 15 aa, synthetic construct
  REGION 1..15: note = source = /note="Description of Artificial Sequence: Synthetic peptide"
LRIKRKRRKRKKTRK

SEQ ID NO: 1549 - DNA, 21 bp, Adeno-associated virus 2
  source 1..21: mol_type = unassigned DNA
agcvvmdcaggarscascaac

SEQ ID NO: 1550 - protein, 7 aa, synthetic construct
  REGION 1..7: note = source = /note="Description of Artificial Sequence: Synthetic peptide"
SDSGASN

SEQ ID NO: 1551 - protein, 7 aa, synthetic construct
  REGION 1..7: note = source = /note="Description of Artificial Sequence: Synthetic peptide"
SPSGASN

SEQ ID NO: 1552 - protein, 7 aa, synthetic construct
  REGION 1..7: note = source = /note="Description of Artificial Sequence: Synthetic peptide"
SHSGASN

SEQ ID NO: 1553 - protein, 7 aa, synthetic construct
  REGION 1..7: note = source = /note="Description of Artificial Sequence: Synthetic peptide"
SRSGASN

SEQ ID NO: 1554 - protein, 7 aa, synthetic construct
  REGION 1..7: note = source = /note="Description of Artificial Sequence: Synthetic peptide"
SKSGASN

SEQ ID NO: 1555 - protein, 7 aa, synthetic construct
  REGION 1..7: note = source = /note="Description of Artificial Sequence: Synthetic peptide"
SNSGASN

SEQ ID NO: 1556 - protein, 7 aa, synthetic construct
  REGION 1..7: note = source = /note="Description of Artificial Sequence: Synthetic peptide"
SGSGASN

SEQ ID NO: 1557 - protein, 7 aa, synthetic construct
  REGION 1..7: note = source = /note="Description of Artificial Sequence: Synthetic peptide"
SASGASN

SEQ ID NO: 1558 - protein, 7 aa, synthetic construct
  REGION 1..7: note = source = /note="Description of Artificial Sequence: Synthetic peptide"
SESGTSN

SEQ ID NO: 1559 - protein, 7 aa, synthetic construct
  REGION 1..7: note = source = /note="Description of Artificial Sequence: Synthetic peptide"
STTGGSN

SEQ ID NO: 1560 - protein, 7 aa, synthetic construct
  REGION 1..7: note = source = /note="Description of Artificial Sequence: Synthetic peptide"
SSAGSTN

SEQ ID NO: 1561 - protein, 6 aa, synthetic construct
  REGION 1..6: note = source = /note="Description of Artificial Sequence: Synthetic peptide"
NNDSQA

SEQ ID NO: 1562 - protein, 6 aa, synthetic construct
  REGION 1..6: note = source = /note="Description of Artificial Sequence: Synthetic peptide"
NNRNQA

SEQ ID NO: 1563 - protein, 6 aa, synthetic construct
  REGION 1..6: note = source = /note="Description of Artificial Sequence: Synthetic peptide"
NNNKQA

SEQ ID NO: 1564 - protein, 6 aa, synthetic construct
  REGION 1..6: note = source = /note="Description of Artificial Sequence: Synthetic peptide"
NAKRQA

SEQ ID NO: 1565 - protein, 6 aa, synthetic construct
  REGION 1..6: note = source = /note="Description of Artificial Sequence: Synthetic peptide"
NDEHQA

SEQ ID NO: 1566 - protein, 6 aa, synthetic construct
  REGION 1..6: note = source = /note="Description of Artificial Sequence: Synthetic peptide"
NTSQKA

SEQ ID NO: 1567 - protein, 25 aa, synthetic construct
  REGION 1..25: note = source = /note="Description of Artificial Sequence: Synthetic peptide"
YYLSRTNTPSGTDTQSRLVFSQAGA

SEQ ID NO: 1568 - protein, 25 aa, synthetic construct
  REGION 1..25: note = source = /note="Description of Artificial Sequence: Synthetic peptide"
YYLSRTNTDSGTETQSGLDFSQAGA

SEQ ID NO: 1569 - protein, 25 aa, synthetic construct
  REGION 1..25: note = source = /note="Description of Artificial Sequence: Synthetic peptide"
YYLSRTNTESGTPTQSALEFSQAGA

SEQ ID NO: 1570 - protein, 25 aa, synthetic construct
  REGION 1..25: note = source = /note="Description of Artificial Sequence: Synthetic peptide"
YYLSRTNTHSGTHTQSPLHFSQAGA

SEQ ID NO: 1571 - protein, 25 aa, synthetic construct
  REGION 1..25: note = source = /note="Description of Artificial Sequence: Synthetic peptide"
YYLSRTNTSSGTITISHLIFSQAGA

SEQ ID NO: 1572 - protein, 25 aa, synthetic construct
  REGION 1..25: note = source = /note="Description of Artificial Sequence: Synthetic peptide"
YYLSRTNTRSGIMTKSSLMFSQAGA

SEQ ID NO: 1573 - protein, 25 aa, synthetic construct
  REGION 1..25: note = source = /note="Description of Artificial Sequence: Synthetic peptide"
YYLSRTNTKSGRKTLSNLSFSQAGA

SEQ ID NO: 1574 - protein, 25 aa, synthetic construct
  REGION 1..25: note = source = /note="Description of Artificial Sequence: Synthetic peptide"
YYLSRTNDGSGPVTPSKLRFSQRGA

SEQ ID NO: 1575 - protein, 25 aa, synthetic construct
  REGION 1..25: note = source = /note="Description of Artificial Sequence: Synthetic peptide"
YYLSRTNAASGHATHSDLKFSQPGA

SEQ ID NO: 1576 - protein, 25 aa, synthetic construct
  REGION 1..25: note = source = /note="Description of Artificial Sequence: Synthetic peptide"
YYLSRTNGQAGSLTMSELGFSQVGA

SEQ ID NO: 1577 - protein, 25 aa, synthetic construct
  REGION 1..25: note = source = /note="Description of Artificial Sequence: Synthetic peptide"
YYLSRTNSTGGNQTTSQLLFSQLSA

SEQ ID NO: 1578 - protein, 25 aa, synthetic construct
  REGION 1..25: note = source = /note="Description of Artificial Sequence: Synthetic peptide"
YFLSRTNNNTGLNTNSTLNFSQGRA

SEQ ID NO: 1579 - protein, 16 aa, synthetic construct
  REGION 1..16: note = source = /note="Description of Artificial Sequence: Synthetic peptide"
SKTGADNNNSEYSWTG

SEQ ID NO: 1580 - protein, 16 aa, synthetic construct
  REGION 1..16: note = source = /note="Description of Artificial Sequence: Synthetic peptide"
SKTDADNNNSEYSWTG

SEQ ID NO: 1581 - protein, 16 aa, synthetic construct
  REGION 1..16: note = source = /note="Description of Artificial Sequence: Synthetic peptide"
SKTEADNNNSEYSWTG

SEQ ID NO: 1582 - protein, 16 aa, synthetic construct
  REGION 1..16: note = source = /note="Description of Artificial Sequence: Synthetic peptide"
SKTPADNNNSEYSWTG

SEQ ID NO: 1583 - protein, 16 aa, synthetic construct
  REGION 1..16: note = source = /note="Description of Artificial Sequence: Synthetic peptide"
SKTHADNNNSEYSWTG

SEQ ID NO: 1584 - protein, 16 aa, synthetic construct
  REGION 1..16: note = source = /note="Description of Artificial Sequence: Synthetic peptide"
SKTQADNNNSEYSWTG

SEQ ID NO: 1585 - protein, 16 aa, synthetic construct
  REGION 1..16: note = source = /note="Description of Artificial Sequence: Synthetic peptide"
SKTIADNNNSEYSWTG

SEQ ID NO: 1586 - protein, 16 aa, synthetic construct
  REGION 1..16: note = source = /note="Description of Artificial Sequence: Synthetic peptide"
SKTMADNNNSEYSWTG

SEQ ID NO: 1587 - protein, 16 aa, synthetic construct
  REGION 1..16: note = source = /note="Description of Artificial Sequence: Synthetic peptide"
SKTRADNNNSEYSWTG

SEQ ID NO: 1588 - protein, 16 aa, synthetic construct
  REGION 1..16: note = source = /note="Description of Artificial Sequence: Synthetic peptide"
SKTNADNNNSEYSWTG

SEQ ID NO: 1589 - protein, 16 aa, synthetic construct
  REGION 1..16: note = source = /note="Description of Artificial Sequence: Synthetic peptide"
SKTVGRNNNSEYSWTG

SEQ ID NO: 1590 - protein, 16 aa, synthetic construct
  REGION 1..16: note = source = /note="Description of Artificial Sequence: Synthetic peptide"
SKTADRNNNSEYSWTG

SEQ ID NO: 1591 - protein, 16 aa, synthetic construct
  REGION 1..16: note = source = /note="Description of Artificial Sequence: Synthetic peptide"
SKKLSQNNNSKYSWQG

SEQ ID NO: 1592 - protein, 16 aa, synthetic construct
  REGION 1..16: note = source = /note="Description of Artificial Sequence: Synthetic peptide"
SKPTTGNNNSDYSWPG

SEQ ID NO: 1593 - protein, 16 aa, synthetic construct
  REGION 1..16: note = source = /note="Description of Artificial Sequence: Synthetic peptide"
STQKNENNNSNYSWPG

SEQ ID NO: 1594 - protein, 8 aa, synthetic construct
  REGION 1..8: note = source = /note="Description of Artificial Sequence: Synthetic peptide"
HKDDEGKF

SEQ ID NO: 1595 - protein, 8 aa, synthetic construct
  REGION 1..8: note = source = /note="Description of Artificial Sequence: Synthetic peptide"
HKDDNRKF

SEQ ID NO: 1596 - protein, 8 aa, synthetic construct
  REGION 1..8: note = source = /note="Description of Artificial Sequence: Synthetic peptide"
HKDDTNKF

SEQ ID NO: 1597 - protein, 8 aa, synthetic construct
  REGION 1..8: note = source = /note="Description of Artificial Sequence: Synthetic peptide"
HEDSDKNF

SEQ ID NO: 1598 - protein, 8 aa, synthetic construct
  REGION 1..8: note = source = /note="Description of Artificial Sequence: Synthetic peptide"
HRDGADSF

SEQ ID NO: 1599 - protein, 8 aa, synthetic construct
  REGION 1..8: note = source = /note="Description of Artificial Sequence: Synthetic peptide"
HGDNKSRF

SEQ ID NO: 1600 - protein, 14 aa, synthetic construct
  REGION 1..14: note = source = /note="Description of Artificial Sequence: Synthetic peptide"
KQGSEKTNVDFEEV

SEQ ID NO: 1601 - protein, 14 aa, synthetic construct
  REGION 1..14: note = source = /note="Description of Artificial Sequence: Synthetic peptide"
KQGSEKTNVDSEEV

SEQ ID NO: 1602 - protein, 14 aa, synthetic construct
  REGION 1..14: note = source = /note="Description of Artificial Sequence: Synthetic peptide"
KQGSEKTNVDVEEV

SEQ ID NO: 1603 - protein, 14 aa, synthetic construct
  REGION 1..14: note = source = /note="Description of Artificial Sequence: Synthetic peptide"
KQGSDKTNVDDAGV

SEQ ID NO: 1604 - protein, 14 aa, synthetic construct
  REGION 1..14: note = source = /note="Description of Artificial Sequence: Synthetic peptide"
KQGSSKTNVDPREV

SEQ ID NO: 1605 - protein, 14 aa, synthetic construct
  REGION 1..14: note = source = /note="Description of Artificial Sequence: Synthetic peptide"
KQGSRKTNVDHKQV

SEQ ID NO: 1606 - protein, 14 aa, synthetic construct
  REGION 1..14: note = source = /note="Description of Artificial Sequence: Synthetic peptide"
KQGSKGGNVDTNRV

SEQ ID NO: 1607 - protein, 14 aa, synthetic construct
  REGION 1..14: note = source = /note="Description of Artificial Sequence: Synthetic peptide"
KQGSGEANVDNGDV

SEQ ID NO: 1608 - protein, 14 aa, synthetic construct
  REGION 1..14: note = source = /note="Description of Artificial Sequence: Synthetic peptide"
KQDAAADNIDYDHV

SEQ ID NO: 1609 - protein, 14 aa, synthetic construct
  REGION 1..14: note = source = /note="Description of Artificial Sequence: Synthetic peptide"
KQSGTRSNAAASSV

SEQ ID NO: 1610 - protein, 14 aa, synthetic construct
  REGION 1..14: note = source = /note="Description of Artificial Sequence: Synthetic peptide"
KENTNTNDTELTNV

SEQ ID NO: 1611 - protein, 14 aa, synthetic construct
  REGION 1..14: note = source = /note="Description of Artificial Sequence: Synthetic peptide"
QRGNNVAATADVNT

SEQ ID NO: 1612 - protein, 14 aa, synthetic construct
  REGION 1..14: note = source = /note="Description of Artificial Sequence: Synthetic peptide"
QRGNNEAATADVNT

SEQ ID NO: 1613 - protein, 14 aa, synthetic construct
  REGION 1..14: note = source = /note="Description of Artificial Sequence: Synthetic peptide"
QRGNNPAATADVNT

SEQ ID NO: 1614 - protein, 14 aa, synthetic construct
  REGION 1..14: note = source = /note="Description of Artificial Sequence: Synthetic peptide"
QRGNNHAATADVNT

SEQ ID NO: 1615 - protein, 14 aa, synthetic construct
  REGION 1..14: note = source = /note="Description of Artificial Sequence: Synthetic peptide"
QEENNIAATPGVNT

SEQ ID NO: 1616 - protein, 14 aa, synthetic construct
  REGION 1..14: note = source = /note="Description of Artificial Sequence: Synthetic peptide"
QPPNNMAATHEVNT

SEQ ID NO: 1617 - protein, 14 aa, synthetic construct
  REGION 1..14: note = source = /note="Description of Artificial Sequence: Synthetic peptide"
QHHNNSAATTIVNT

SEQ ID NO: 1618 - protein, 14 aa, synthetic construct
  REGION 1..14: note = source = /note="Description of Artificial Sequence: Synthetic peptide"
QTTNNRAAFNMVET

SEQ ID NO: 1619 - protein, 14 aa, synthetic construct
  REGION 1..14: note = source = /note="Description of Artificial Sequence: Synthetic peptide"
QKKNNNAASKKVAT

SEQ ID NO: 1620 - protein, 14 aa, synthetic construct
  REGION 1..14: note = source = /note="Description of Artificial Sequence: Synthetic peptide"
QGGNNKAADDAVKT

SEQ ID NO: 1621 - protein, 14 aa, synthetic construct
  REGION 1..14: note = source = /note="Description of Artificial Sequence: Synthetic peptide"
QAAKGGAADDAVKT

SEQ ID NO: 1622 - protein, 14 aa, synthetic construct
  REGION 1..14: note = source = /note="Description of Artificial Sequence: Synthetic peptide"
QDDRAAAANESVDT

SEQ ID NO: 1623 - protein, 14 aa, synthetic construct
  REGION 1..14: note = source = /note="Description of Artificial Sequence: Synthetic peptide"
QQQHDDAAYQRVHT

SEQ ID NO: 1624 - protein, 14 aa, synthetic construct
  REGION 1..14: note = source = /note="Description of Artificial Sequence: Synthetic peptide"
QSSSSLAAVSTVQT

SEQ ID NO: 1625 - protein, 14 aa, synthetic construct
  REGION 1..14: note = source = /note="Description of Artificial Sequence: Synthetic peptide"
QNNQTTAAIRNVTT

SEQ ID NO: 1626 - protein, 12 aa, synthetic construct
  REGION 1..12: note = source = /note="Description of Artificial Sequence: Synthetic peptide"
NYNKKSDNVDFT

SEQ ID NO: 1627 - protein, 12 aa, synthetic construct
  REGION 1..12: note = source = /note="Description of Artificial Sequence: Synthetic peptide"
NYNKKSENVDFT

SEQ ID NO: 1628 - protein, 12 aa, synthetic construct
  REGION 1..12: note = source = /note="Description of Artificial Sequence: Synthetic peptide"
NYNKKSLNVDFT

SEQ ID NO: 1629 - protein, 12 aa, synthetic construct
  REGION 1..12: note = source = /note="Description of Artificial Sequence: Synthetic peptide"
NYNKKSPNVDFT

SEQ ID NO: 1630 - protein, 12 aa, synthetic construct
  REGION 1..12: note = source = /note="Description of Artificial Sequence: Synthetic peptide"
NYSKKSHCVDFT

SEQ ID NO: 1631 - protein, 11 aa, synthetic construct
  REGION 1..11: note = source = /note="Description of Artificial Sequence: Synthetic peptide"
NYRKTIYVDFT

SEQ ID NO: 1632 - protein, 11 aa, synthetic construct
  REGION 1..11: note = source = /note="Description of Artificial Sequence: Synthetic peptide"
NYKEKKDVHFT

SEQ ID NO: 1633 - protein, 11 aa, synthetic construct
  REGION 1..11: note = source = /note="Description of Artificial Sequence: Synthetic peptide"
NYGHRAIVQFT

SEQ ID NO: 1634 - protein, 11 aa, synthetic construct
  REGION 1..11: note = source = /note="Description of Artificial Sequence: Synthetic peptide"
NYANHQFVVCT

SEQ ID NO: 1635 - protein, 12 aa, synthetic construct
  REGION 1..12: note = source = /note="Description of Artificial Sequence: Synthetic peptide"
NYDDDPTGVLLT

SEQ ID NO: 1636 - protein, 11 aa, synthetic construct
  REGION 1..11: note = source = /note="Description of Artificial Sequence: Synthetic peptide"
NYDDPTGVLLT

SEQ ID NO: 1637 - protein, 11 aa, synthetic construct
  REGION 1..11: note = source = /note="Description of Artificial Sequence: Synthetic peptide"
NFEQQNSVEWT

SEQ ID NO: 1638 - protein, 7 aa, synthetic construct
  REGION 1..7: note = source = /note="Description of Artificial Sequence: Synthetic peptide"
SQSGASN

SEQ ID NO: 1639 - protein, 6 aa, synthetic construct
  REGION 1..6: note = source = /note="Description of Artificial Sequence: Synthetic peptide"
NNGSQA

SEQ ID NO: 1640 - protein, 25 aa, synthetic construct
  REGION 1..25: note = source = /note="Description of Artificial Sequence: Synthetic peptide"
YYLSRTNTPSGTTTWSRLQFSQAGA

SEQ ID NO: 1641 - protein, 16 aa, synthetic construct
  REGION 1..16: note = source = /note="Description of Artificial Sequence: Synthetic peptide"
SKTSADNNNSEYSWTG

SEQ ID NO: 1642 - protein, 8 aa, synthetic construct
  REGION 1..8: note = source = /note="Description of Artificial Sequence: Synthetic peptide"
HKDDEEKF

SEQ ID NO: 1643 - protein, 14 aa, synthetic construct
  REGION 1..14: note = source = /note="Description of Artificial Sequence: Synthetic peptide"
KQGSEKTNVDIEEV

SEQ ID NO: 1644 - protein, 14 aa, synthetic construct
  REGION 1..14: note = source = /note="Description of Artificial Sequence: Synthetic peptide"
QRGNNQAATADVNT

SEQ ID NO: 1645 - protein, 12 aa, synthetic construct
  REGION 1..12: note = source = /note="Description of Artificial Sequence: Synthetic peptide"
NYNKKSVNVDFT

SEQ ID NO: 1646 - protein, 42 aa, synthetic construct
  REGION 1..42: note = source = /note="Description of Artificial Sequence: Synthetic polypeptide"
SQSGASNYNTPSGTTTQSRLQFSTSADNNNSEYSWTGATKYH

SEQ ID NO: 1647 - protein, 42 aa, synthetic construct
  REGION 1..42: note = source = /note="Description of Artificial Sequence: Synthetic polypeptide"
SASGASNFNSEGGSLTQSSLGFSTDGENNNSDFSWTGATKYH

SEQ ID NO: 1648 - protein, 42 aa, synthetic construct
  REGION 1..42: note = source = /note="Description of Artificial Sequence: Synthetic polypeptide"
SQSGASNYNTPSGTTTQSRLQFSTDGENNNSDFSWTGATKYH

SEQ ID NO: 1649 - protein, 42 aa, synthetic construct
  REGION 1..42: note = source = /note="Description of Artificial Sequence: Synthetic polypeptide"
SASGASNYNTPSGTTTQSRLQFSTSADNNNSEFSWPGATTYH

SEQ ID NO: 1650 - protein, 42 aa, synthetic construct
  REGION 1..42: note = source = /note="Description of Artificial Sequence: Synthetic polypeptide"
SQSGASNFNSEGGSLTQSSLGFSTDGENNNSDFSWTGATKYH

SEQ ID NO: 1651 - protein, 42 aa, synthetic construct
  REGION 1..42: note = source = /note="Description of Artificial Sequence: Synthetic polypeptide"
SASGASNYNTPSGSLTQSSLGFSTDGENNNSDFSWTGATKYH

SEQ ID NO: 1652 - protein, 42 aa, synthetic construct
  REGION 1..42: note = source = /note="Description of Artificial Sequence: Synthetic polypeptide"
SQSGASNYNTPSGTTTQSRLQFSTSADNNNSDFSWTGATKYH

SEQ ID NO: 1653 - protein, 42 aa, synthetic construct
  REGION 1..42: note = source = /note="Description of Artificial Sequence: Synthetic polypeptide"
SGAGASNFNSEGGSLTQSSLGFSTDGENNNSDFSWTGATKYH

SEQ ID NO: 1654 - protein, 7 aa, synthetic construct
  REGION 1..7: note = source = /note="Description of Artificial Sequence: Synthetic peptide"
SGAGASN

SEQ ID NO: 1655 - protein, 15 aa, synthetic construct
  REGION 1..15: note = source = /note="Description of Artificial Sequence: Synthetic peptide"
NSEGGSLTQSSLGFS

SEQ ID NO: 1656 - protein, 11 aa, synthetic construct
  REGION 1..11: note = source = /note="Description of Artificial Sequence: Synthetic peptide"
TDGENNNSDFS

SEQ ID NO: 1657 - protein, 10 aa, synthetic construct
  REGION 1..10: note = source = /note="Description of Artificial Sequence: Synthetic peptide"
SEFSWPGATT

SEQ ID NO: 1658 - protein, 13 aa, synthetic construct
  REGION 1..13: note = source = /note="Description of Artificial Sequence: Synthetic peptide"
TSADNNNSDFSWT

SEQ ID NO: 1659 - protein, 8 aa, synthetic construct
  REGION 1..8: note = source = /note="Description of Artificial Sequence: Synthetic peptide"
SQSGASNY

SEQ ID NO: 1660 - protein, 15 aa, synthetic construct
  REGION 1..15: note = source = /note="Description of Artificial Sequence: Synthetic peptide"
NTPSGTTTQSRLQFS

SEQ ID NO: 1661 - protein, 19 aa, synthetic construct
  REGION 1..19: note = source = /note="Description of Artificial Sequence: Synthetic peptide"
TSADNNNSEYSWTGATKYH

SEQ ID NO: 1662 - protein, 8 aa, synthetic construct
  REGION 1..8: note = source = /note="Description of Artificial Sequence: Synthetic peptide"
SASGASNF

SEQ ID NO: 1663 - protein, 19 aa, synthetic construct
  REGION 1..19: note = source = /note="Description of Artificial Sequence: Synthetic peptide"
TDGENNNSDFSWTGATKYH

SEQ ID NO: 1664 - protein, 8 aa, synthetic construct
  REGION 1..8: note = source = /note="Description of Artificial Sequence: Synthetic peptide"
SASGASNY

SEQ ID NO: 1665 - protein, 19 aa, synthetic construct
  REGION 1..19: note = source = /note="Description of Artificial Sequence: Synthetic peptide"
TSADNNNSEFSWPGATTYH

SEQ ID NO: 1666 - protein, 15 aa, synthetic construct
  REGION 1..15: note = source = /note="Description of Artificial Sequence: Synthetic peptide"
NTPSGSLTQSSLGFS

SEQ ID NO: 1667 - protein, 19 aa, synthetic construct
  REGION 1..19: note = source = /note="Description of Artificial Sequence: Synthetic peptide"
TSADNNNSDFSWTGATKYH

SEQ ID NO: 1668 - protein, 8 aa, synthetic construct
  REGION 1..8: note = source = /note="Description of Artificial Sequence: Synthetic peptide"
SGAGASNF

SEQ ID NO: 1669 - DNA, 48 bp, synthetic construct
  misc_difference 20: note = modified_base - a, c, t, or g
  misc_difference 35: note = modified_base - a, c, t, or g
  misc_feature 1..48: note = source = /note="Description of Artificial Sequence: Synthetic oligonucleotide"
  source 1..48: mol_type = other DNA
ctccagvvsvvsmrsrvcvnsgcagctdhcvvsrnsgtcvmsacacaa

SEQ ID NO: 1670 - DNA, 48 bp, synthetic construct
  misc_feature 1..48: note = source = /note="Description of Artificial Sequence: Synthetic oligonucleotide"
  source 1..48: mol_type = other DNA
ctccagagaggcaacagacaagcagctaccgcagatgtcaacacacaa

SEQ ID NO: 1671 - protein, 7 aa, synthetic construct
  REGION 1..7: note = source = /note="Description of Artificial Sequence: Synthetic peptide"
SAAGASN

SEQ ID NO: 1672 - protein, 24 aa, synthetic construct
  REGION 1..24: note = source = /note="Description of Artificial Sequence: Synthetic peptide"
YFLSRTNTESGSTTQSTLRFSQAG

SEQ ID NO: 1673 - protein, 13 aa, synthetic construct
  REGION 1..13: note = source = /note="Description of Artificial Sequence: Synthetic peptide"
SKTSADNNNSDFS

SEQ ID NO: 1674 - protein, 14 aa, synthetic construct
  REGION 1..14: note = source = /note="Description of Artificial Sequence: Synthetic peptide"
KQGSEKTDVDIDKV

SEQ ID NO: 1675 - protein, 7 aa, synthetic construct
  REGION 1..7: note = source = /note="Description of Artificial Sequence: Synthetic peptide"
STAGASN

SEQ ID NO: 1676 - protein, 24 aa, synthetic construct
  REGION 1..24: note = source = /note="Description of Artificial Sequence: Synthetic peptide"
YFLSRTNTTSGIETQSTLRFSQAG

SEQ ID NO: 1677 - protein, 13 aa, synthetic construct
  REGION 1..13: note = source = /note="Description of Artificial Sequence: Synthetic peptide"
SKTDGENNNSDFS

SEQ ID NO: 1678 - protein, 14 aa, synthetic construct
  REGION 1..14: note = source = /note="Description of Artificial Sequence: Synthetic peptide"
KQGAAADDVEIDGV

SEQ ID NO: 1679 - protein, 7 aa, synthetic construct
  REGION 1..7: note = source = /note="Description of Artificial Sequence: Synthetic peptide"
SEAGASN

SEQ ID NO: 1680 - protein, 24 aa, synthetic construct
  REGION 1..24: note = source = /note="Description of Artificial Sequence: Synthetic peptide"
YYLSRTNTPSGTTTQSRLQFSQAG

SEQ ID NO: 1681 - protein, 13 aa, synthetic construct
  REGION 1..13: note = source = /note="Description of Artificial Sequence: Synthetic peptide"
SKTSADNNNSEYS

SEQ ID NO: 1682 - protein, 14 aa, synthetic construct
  REGION 1..14: note = source = /note="Description of Artificial Sequence: Synthetic peptide"
KQGSEKTNVDIEKV

SEQ ID NO: 1683 - protein, 24 aa, synthetic construct
  REGION 1..24: note = source = /note="Description of Artificial Sequence: Synthetic peptide"
YFLSRTNDASGSDTKSTLLFSQAG

SEQ ID NO: 1684 - protein, 13 aa, synthetic construct
  REGION 1..13: note = source = /note="Description of Artificial Sequence: Synthetic peptide"
STTPSENNNSEYS

SEQ ID NO: 1685 - protein, 7 aa, synthetic construct
  REGION 1..7: note = source = /note="Description of Artificial Sequence: Synthetic peptide"
SAAGATN

SEQ ID NO: 1686 - protein, 24 aa, synthetic construct
  REGION 1..24: note = source = /note="Description of Artificial Sequence: Synthetic peptide"
YFLSRTNGEAGSATLSELRFSQAG

SEQ ID NO: 1687 - protein, 8 aa, synthetic construct
  REGION 1..8: note = source = /note="Description of Artificial Sequence: Synthetic peptide"
HGDDADRF

SEQ ID NO: 1688 - protein, 14 aa, synthetic construct
  REGION 1..14: note = source = /note="Description of Artificial Sequence: Synthetic peptide"
KQGAEKSDVEVDRV

SEQ ID NO: 1689 - protein, 14 aa, synthetic construct
  REGION 1..14: note = source = /note="Description of Artificial Sequence: Synthetic peptide"
KQDSGGDNIDIDQV

SEQ ID NO: 1690 - protein, 7 aa, synthetic construct
  REGION 1..7: note = source = /note="Description of Artificial Sequence: Synthetic peptide"
SDAGASN

SEQ ID NO: 1691 - protein, 24 aa, synthetic construct
  REGION 1..24: note = source = /note="Description of Artificial Sequence: Synthetic peptide"
YFLSRTNTEGGHDTQSTLRFSQAG

SEQ ID NO: 1692 - protein, 14 aa, synthetic construct
  REGION 1..14: note = source = /note="Description of Artificial Sequence: Synthetic peptide"
KEDGGGSDVAIDEV

SEQ ID NO: 1693 - protein, 7 aa, synthetic construct
  REGION 1..7: note = source = /note="Description of Artificial Sequence: Synthetic peptide"
SNAGASN

SEQ ID NO: 1694 - protein, 24 aa, synthetic construct
  REGION 1..24: note = source = /note="Description of Artificial Sequence: Synthetic peptide"
YFLSRTNGEAGSATLSELRFSQPG

SEQ ID NO: 1695 - DNA, 21 bp, synthetic construct
  misc_feature 1..21: note = source = /note="Description of Artificial Sequence: Synthetic oligonucleotide"
  source 1..21: mol_type = other DNA
agcvvmdcaggarscascaac

SEQ ID NO: 1696 - DNA, 18 bp, synthetic construct
  misc_feature 1..18: note = source = /note="Description of Artificial Sequence: Synthetic oligonucleotide"
  source 1..18: mol_type = other DNA
aacracrrsmrsmaggca

SEQ ID NO: 1697 - DNA, 24 bp, synthetic construct
  misc_feature 1..24: note = source = /note="Description of Artificial Sequence: Synthetic oligonucleotide"
  source 1..24: mol_type = other DNA
cacrrggacrrcrmsrrsarsttt

SEQ ID NO: 1698 - DNA, 75 bp, synthetic construct
  misc_difference 35: note = modified_base - a, c, t, or g
  misc_feature 1..75: note = source = /note="Description of Artificial Sequence: Synthetic oligonucleotide"
  source 1..75: mol_type = other DNA
tatttcttgagcagaacaaacrvcvvsrscggamncvhsacgmhstcavvscttvdsttttctcagsbcrgsgcg

SEQ ID NO: 1699 - DNA, 48 bp, synthetic construct
  misc_difference 11: note = modified_base - a, c, t, or g
  misc_feature 1..48: note = source = /note="Description of Artificial Sequence: Synthetic oligonucleotide"
  source 1..48: mol_type = other DNA
tcaamammavnsrvcsrsaacaacaacagtrasttctcgtggmmagga

SEQ ID NO: 1700 - DNA, 42 bp, synthetic construct
  misc_difference 31: note = modified_base - a, c, t, or g
  misc_feature 1..42: note = source = /note="Description of Artificial Sequence: Synthetic oligonucleotide"
  source 1..42: mol_type = other DNA
aagsaarrcrscrvsrvarvcratrycgmsnhcrvmvrsgtc

SEQ ID NO: 1701 - DNA, 42 bp, synthetic construct
  misc_difference 17: note = modified_base - a, c, t, or g
  misc_difference 32: note = modified_base - a, c, t, or g
  misc_feature 1..42: note = source = /note="Description of Artificial Sequence: Synthetic oligonucleotide"
  source 1..42: mol_type = other DNA
cagvvsvvsmrsrvcvnsgcagctdhcvvsrnsgtcvmsaca

SEQ ID NO: 1702 - DNA, 33 bp, synthetic construct
  misc_feature 1..33: note = source = /note="Description of Artificial Sequence: Synthetic oligonucleotide"
  source 1..33: mol_type = other DNA
aactwcrvsvasmvsvhsddtgtgswstksact

SEQ ID NO: 1703 - DNA, 30 bp, synthetic construct
  misc_feature 1..30: note = source = /note="Description of Artificial Sequence: Synthetic oligonucleotide"
  source 1..30: mol_type = other DNA
ttgttgaacatcaccacgtgacgcacgttc

SEQ ID NO: 1704 - DNA, 30 bp, synthetic construct
  misc_feature 1..30: note = source = /note="Description of Artificial Sequence: Synthetic oligonucleotide"
  source 1..30: mol_type = other DNA
tccccgtggttctactacataatgtggccg

SEQ ID NO: 1705 - DNA, 30 bp, synthetic construct
  misc_feature 1..30: note = source = /note="Description of Artificial Sequence: Synthetic oligonucleotide"
  source 1..30: mol_type = other DNA
ttccacactccgttttggataatgttgaac

SEQ ID NO: 1706 - DNA, 30 bp, synthetic construct
  misc_feature 1..30: note = source = /note="Description of Artificial Sequence: Synthetic oligonucleotide"
  source 1..30: mol_type = other DNA
agggacatccccagctccatgctgtggtcg

SEQ ID NO: 1707 - DNA, 30 bp, synthetic construct
  misc_feature 1..30: note = source = /note="Description of Artificial Sequence: Synthetic oligonucleotide"
  source 1..30: mol_type = other DNA
agggacaacccctccgactcgccctaatcc

SEQ ID NO: 1708 - DNA, 30 bp, synthetic construct
  misc_feature 1..30: note = source = /note="Description of Artificial Sequence: Synthetic oligonucleotide"
  source 1..30: mol_type = other DNA
tcctagtagaagacaccctctcactgcccg

SEQ ID NO: 1709 - DNA, 30 bp, synthetic construct
  misc_feature 1..30: note = source = /note="Description of Artificial Sequence: Synthetic oligonucleotide"
  source 1..30: mol_type = other DNA
agtaccatgtacacccactctcccagtgcc

SEQ ID NO: 1710 - DNA, 30 bp, synthetic construct
  misc_feature 1..30: note = source = /note="Description of Artificial Sequence: Synthetic oligonucleotide"
  source 1..30: mol_type = other DNA
atatggacgttcatgctgatcaccataccg

SEQ ID NO: 1711 - DNA, 30 bp, synthetic construct
  misc_feature 1..30: note = source = /note="Description of Artificial Sequence: Synthetic oligonucleotide"
  source 1..30: mol_type = other DNA
agcaggagctccttggcctcagcgtgcgag

SEQ ID NO: 1712 - DNA, 30 bp, synthetic construct
  misc_feature 1..30: note = source = /note="Description of Artificial Sequence: Synthetic oligonucleotide"
  source 1..30: mol_type = other DNA
acaagcagcttcactatgacaaccactgac

SEQ ID NO: 1713 - DNA, 284 bp, synthetic construct
  misc_difference 59: note = modified_base - a, c, t, or g
  misc_difference 244: note = modified_base - a, c, t, or g
  misc_feature 1..284: note = source = /note="Description of Artificial Sequence: Synthetic polynucleotide"
  source 1..284: mol_type = other DNA
cagcctaggaactggcttcctggaccctgttaccgccagcagagagtctcaamammavnsrvcsrsaacaacaacagtrasttctcctggmmaggagctaccaagtaccacctcaatggcagagactctctggtgaatcccggaccagctatggcaagccacrrggacrrcrmsrrsarsttttttcctcagagcggggttctcatctttgggaagsaarrcrscrvsrvarvcratrycgmsnhcrvmvrsgtcatgattacagacgaagaggagatctggac

SEQ ID NO: 1714 - DNA, 34 bp, synthetic construct
  misc_feature 1..34: note = source = /note="Description of Artificial Sequence: Synthetic oligonucleotide"
  source 1..34: mol_type = other DNA
tgggacaatggcggtcgtctctcagagttktkkt

SEQ ID NO: 1715 - DNA, 35 bp, synthetic construct
  misc_feature 1..35: note = source = /note="Description of Artificial Sequence: Synthetic oligonucleotide"
  source 1..35: mol_type = other DNA
agaggacckktcctcgatggttcatggtggagtta

SEQ ID NO: 1716 - DNA, 31 bp, synthetic construct
  misc_feature 1..31: note = source = /note="Description of Artificial Sequence: Synthetic oligonucleotide"
  source 1..31: mol_type = other DNA
ccacttagggcctggtcgataccgttcggtg

SEQ ID NO: 1717 - DNA, 32 bp, synthetic construct
  misc_feature 1..32: note = source = /note="Description of Artificial Sequence: Synthetic oligonucleotide"
  source 1..32: mol_type = other DNA
tctcgccccaagagtagaaacccttcsttyyg

SEQ ID NO: 1718 - protein, 735 aa, Adeno-associated virus 2 [sequence omitted]

SEQ ID NO: 1719 - protein, 736 aa, Adeno-associated virus 4; identical to SEQ ID NO: 134

SEQ ID NO: 1720 - protein, 7 aa, synthetic construct
  REGION 1..7: note = source = /note="Description of Artificial Sequence: Synthetic peptide"
GSTPPPM

SEQ ID NO: 1721 - protein, 7 aa, synthetic construct
  REGION 1..7: note = source = /note="Description of Artificial Sequence: Synthetic peptide"
GETRAPL

SEQ ID NO: 1722 - protein, 6 aa, synthetic construct
  REGION 1..6: note = source = /note="Description of Artificial Sequence: Synthetic peptide"
SPAKFA

SEQ ID NO: 1723 - protein, 6 aa, synthetic construct
  REGION 1..6: note = source = /note="Description of Artificial Sequence: Synthetic peptide"
NKDKLN

SEQ ID NO: 1724 - DNA, 12 bp, synthetic construct
  misc_feature 1..12: note = source = /note="Description of Artificial Sequence: Synthetic oligonucleotide"
  source 1..12: mol_type = other DNA
agaaagaggcga

SEQ ID NO: 1725 - DNA, 12 bp, synthetic construct
  misc_feature 1..12: note = source = /note="Description of Artificial Sequence: Synthetic oligonucleotide"
  source 1..12: mol_type = other DNA
cgggccaagcgg

SEQ ID NO: 1726 - DNA, 54 bp, synthetic construct
  misc_feature 1..54: note = source = /note="Description of Artificial Sequence: Synthetic oligonucleotide"
  source 1..54: mol_type = other DNA
gagggcagaggaagtcttctaacatgcggtgacgtggaggagaatcccggccct

SEQ ID NO: 1727 - DNA, 75 bp, synthetic construct
  misc_feature 1..75: note = source = /note="Description of Artificial Sequence: Synthetic oligonucleotide"
  source 1..75: mol_type = other DNA
ggaagcggagtgaaacagactttgaattttgaccttctcaagttggcgggagacgtggagtccaaccctggacct

SEQ ID NO: 1728 - DNA, 66 bp, synthetic construct
  misc_feature 1..66: note = source = /note="Description of Artificial Sequence: Synthetic oligonucleotide"
  source 1..66: mol_type = other DNA
ggaagcggagctactaacttcagcctgctgaagcaggctggagacgtggaggagaaccctggacct

SEQ ID NO: 1729 - DNA, 18 bp, synthetic construct
  misc_feature 1..18: note = source = /note="Description of Artificial Sequence: Synthetic oligonucleotide"
  source 1..18: mol_type = other DNA
tccggaggcggcggcagc

SEQ ID NO: 1730 - DNA, 45 bp, synthetic construct
  misc_feature 1..45: note = source = /note="Description of Artificial Sequence: Synthetic oligonucleotide"
  source 1..45: mol_type = other DNA
ggaggggggggttcgggtggcggcggaagtgggggcggtggttct

SEQ ID NO: 1731 - DNA, 75 bp, synthetic construct
  misc_feature 1..75: note = source = /note="Description of Artificial Sequence: Synthetic oligonucleotide"
  source 1..75: mol_type = other DNA
ggcggaggtggctccggaggcggaggcagcggcggaggtgggtctggcggaggcgggtgcggcggaggtggctcc

SEQ ID NO: 1732 - DNA, 609 bp, synthetic construct
  misc_feature 1..609: note = source = /note="Description of Artificial Sequence: Synthetic polynucleotide"
  source 1..609: mol_type = other DNA
aattccgcccctctcccccccccccctctccctcccccccccctaacgttactggccgaagccgcttggaataaggccggtgtgcgtttgtctatatgttattttccaccatattgccgtcttttggcaatgtgagggcccggaaacctggccctgtcttcttgacgagcattcctaggggtctttcccctctcgccaaaggaatgcaaggtctgttgaatgtcgtgaaggaagcagttcctctggaagcttcttgaagacaaacaacgtctgtagcgaccctttgcaggcagcggaaccccccacctggcgacaggtgcctctgcggccaaaagccacgtgtataagatacacctgcaaaggcggcacaaccccagtgccacgttgtgagttggatagttgtggaaagagtcaaatggctctcctcaagcgtattcaacaaggggctgaaggatgcccagaaggtaccccattgtatgggatctgatctggggcctcggtgcacatgctttacatgtgtttagtcgaggttaaaaaaacgtctaggccccccgaaccacggggacgtggttttcctttgaaaaacacgatgataatatggccacaacc

SEQ ID NO: 1733 - DNA, 623 bp, synthetic construct
  misc_feature 1..623: note = source = /note="Description of Artificial Sequence: Synthetic polynucleotide"
  source 1..623: mol_type = other DNA
taacgaattccgcccctctcccccccccccctctccctcccccccccctaacgttactggccgaagccgcttggaataaggccggtgtgcgtttgtctatatgttattttccaccatattgccgtcttttggcaatgtgagggcccggaaacctggccctgtcttcttgacgagcattcctaggggtctttcccctctcgccaaaggaatgcaaggtctgttgaatgtcgtgaaggaagcagttcctctggaagcttcttgaagacaaacaacgtctgtagcgaccctttgcaggcagcggaaccccccacctggcgacaggtgcctctgcggccaaaagccacgtgtataagatacacctgcaaaggcggcacaaccccagtgccacgttgtgagttggatagttgtggaaagagtcaaatggctctcctcaagcgtattcaacaaggggctgaaggatgcccagaaggtaccccattgtatgggatctgatctggggcctcggtgcacatgctttacatgtgtttagtcgaggttaaaaaaacgtctaggccccccgaaccacggggacgtggttttcctttgaaaaacacgatgataatatggccacaaccgccgccacc

SEQ ID NO: 1734 - DNA, 54 bp, synthetic construct
  misc_feature 1..54: note = source = /note="Description of Artificial Sequence: Synthetic oligonucleotide"
  source 1..54: mol_type = other DNA
gtggagaggaagtgctgcgtggagtgcccaccatgccctgcccctcctgtggcc

SEQ ID NO: 1735 - DNA, 108 bp, synthetic construct
  misc_feature 1..108: note = source = /note="Description of Artificial Sequence: Synthetic polynucleotide"
  source 1..108: mol_type = other DNA
gagctcaaaaccccacttggtgacacaactcacacatgcccacggtgcccagagcccaaatcttgtgacacacctcccccgtgcccacggtgcccagcacctgaactc

SEQ ID NO: 1736 - DNA, 153 bp, synthetic construct
  misc_feature 1..153: note = source = /note="Description of Artificial Sequence: Synthetic polynucleotide"
  source 1..153: mol_type = other DNA
gagctcaaaaccccacttggtgacacaactcacacatgcccacggtgcccagagcccaaatcttgtgacacacctcccccgtgcccacggtgcccagagcccaaatcttgtgacacacctcccccatgcccacggtgcccagcacctgaactc

SEQ ID NO: 1737 - DNA, 198 bp, synthetic construct
  misc_feature 1..198: note = source = /note="Description of Artificial Sequence: Synthetic polynucleotide"
  source 1..198: mol_type = other DNA
gagctcaaaaccccacttggtgacacaactcacacatgcccacggtgcccagagcccaaatcttgtgacacacctcccccgtgcccacggtgcccagagcccaaatcttgtgacacacctcccccatgcccacggtgcccagagcccaaatcttgtgacacacctcccccgtgcccaaggtgcccagcacctgaactc

SEQ ID NO: 1738 - DNA, 45 bp, synthetic construct
  misc_feature 1..45: note = source = /note="Description of Artificial Sequence: Synthetic oligonucleotide"
  source 1..45: mol_type = other DNA
gtgcccagggattgtggttgtaagccttgcatatgtacagtccca

SEQ ID NO: 1739 - DNA, 18 bp, synthetic construct
  misc_feature 1..18: note = source = /note="Description of Artificial Sequence: Synthetic oligonucleotide"
  source 1..18: mol_type = other DNA
gtgcccagggattgtggt

SEQ ID NO: 1740 - protein, 536 aa, Homo sapiens
MEFSSPSREECPKPLSRVSIMAGSLTGLLLLQAVSWASGARPCIPKSFGYSSVVCVCNATYCDSFDPPTFPALGTFSRYESTRSGRRMELSMGPIQANHTGTGLLLTLQPEQKFQKVKGFGGAMTDAAALNILALSPPAQNLLLKSYFSEEGIGYNIIRVPMASCDFSIRTYTYADTPDDFQLHNFSLPEEDTKLKIPLIHRALQLAQRPVSLLASPWTSPTWLKTNGAVNGKGSLKGQPGDIYHQTWARYFVKFLDAYAEHKLQFWAVTAENEPSAGLLSGYPFQCLGFTPEHQRDFIARDLGPTLANSTHHNVRLLMLDDQRLLLPHWAKVVLTDPEAAKYVHGIAVHWYLDFLAPAKATLGETHRLFPNTMLFASEACVGSKFWEQSVRLGSWDRGMQYSHSIITNLLYHVVGWTDWNLALNPEGGPNWVRNFVDSPIIVDITKDTFYKQPMFYHLGHFSKFIPEGSQRVGLVASQKNDLDAVALMHPDGSAVVVVLNRSSKDVPLTIKDPAVGFLETISPGYSIHTYLWRRQ

SEQ ID NO: 1741 - DNA, 2291 bp, Homo sapiens
  source 1..2291: mol_type = unassigned DNA
ggaattacttgcagggctaacctagtgcctatagctaaggcaggtacctgcatccttgtttttgtttagtggatcctctatccttcagagactctggaacccctgtggtcttctcttcatctaatgaccctgaggggatggagttttcaagtccttccagagaggaatgtcccaagcctttgagtagggtaagcatcatggctggcagcctcacaggattgcttctacttcaggcagtgtcgtgggcatcaggtgcccgcccctgcatccctaaaagcttcggctacagctcggtggtgtgtgtctgcaatgccacatactgtgactcctttgaccccccgacctttcctgcccttggtaccttcagccgctatgagagtacacgcagtgggcgacggatggagctgagtatggggcccatccaggctaatcacacgggcacaggcctgctactgaccctgcagccagaacagaagttccagaaagtgaagggatttggaggggccatgacagatgctgctgctctcaacatccttgccctgtcaccccctgcccaaaatttgctacttaaatcgtacttctctgaagaaggaatcggatataacatcatccgggtacccatggccagctgtgacttctccatccgcacctacacctatgcagacacccctgatgatttccagttgcacaacttcagcctcccagaggaagataccaagctcaagatacccctgattcaccgagccctgcagttggcccagcgtcccgtttcactccttgccagcccctggacatcacccacttggctcaagaccaatggagcggtgaatgggaaggggtcactcaagggacagcccggagacatctaccaccagacctgggccagatactttgtgaagttcctggatgcctatgctgagcacaagttacagttctgggcagtgacagctgaaaatgagccttctgctgggctgttgagtggataccccttccagtgcctgggcttcacccctgaacatcagcgagacttcattgcccgtgacctaggtcctaccctcgccaacagtactcaccacaatgtccgcctactcatgctggatgaccaacgcttgctgctgccccactgggcaaaggtggtactgacagacccagaagcagctaaatatgttcatggcattgctgtacattggtacctggactttctggctccagccaaagccaccctaggggagacacaccgcctgttccccaacaccatgctctttgcctcagaggcctgtgtgggctccaagttctgggagcagagtgtgcggctaggctcctgggatcgagggatgcagtacagccacagcatcatcacgaacctcctgtaccatgtggtcggctggaccgactggaaccttgccctgaaccccgaaggaggacccaattgggtgcgtaactttgtcgacagtcccatcattgtagacatcaccaaggacacgttttacaaacagcccatgttctaccaccttggccacttcagcaagttcattcctgagggctcccagagagtggggctggttgccagtcagaagaacgacctggacgcagtggcactgatgcatcccgatggctctgctgttgtggtcgtgctaaaccgctcctctaaggatgtgcctcttaccatcaaggatcctgctgtgggcttcctggagacaatctcacctggctactccattcacacctacctgtggcgtcgccagtgatggagcagatactcaaggaggcactgggctcagcctgggcattaaagggacagagtcagctcacacgctgtctgtgactaaagagggcacagcagggccagtgtgagcttacagcgacgtaagcccaggggcaatggtttgggtgactcactttcccctctaggtggtgccaggggctggaggcccctagaaaaagatcagtaagccccagtgtccccccagcccccatgcttatgtgaacatgcgctgtgtgctgcttgctttggaaactgggcctgggtccaggcctagggtgagctcactgtccgtacaaacacaagatcagggctgagggtaaggaaaagaagagactaggaaagctgggcccaaaactggagactgtttgtctttcctggagatgcagaactgggcccgtggagcagcagtgtcagcatcagggcggaagccttaaagcagcagcgggtgtgcccaggcacccagatgattcctatggcaccagccaggaaaaatggcagctcttaaaggagaaaatgtttgagccca

SEQ ID NO: 1742 - protein, 536 aa, Homo sapiens; identical to SEQ ID NO: 1740

SEQ ID NO: 1743 - DNA, 2344 bp, Homo sapiens
  source 1..2344: mol_type = unassigned DNA
atcctgccttcagagtcttactgcgcggggccccagtctccagtcccgcccaggcgcctttgcaggctgcggtgggatttcgttttgcctccggttggggctgctgtttctcttcgccgacgtggatcctctatccttcagagactctggaacccctgtggtcttctcttcatctaatgaccctgaggggatggagttttcaagtccttccagagaggaatgtcccaagcctttgagtagggtaagcatcatggctggcagcctcacaggattgcttctacttcaggcagtgtcgtgggcatcaggtgcccgcccctgcatccctaaaagcttcggctacagctcggtggtgtgtgtctgcaatgccacatactgtgactcctttgaccccccgacctttcctgcccttggtaccttcagccgctatgagagtacacgcagtgggcgacggatggagctgagtatggggcccatccaggctaatcacacgggcacaggcctgctactgaccctgcagccagaacagaagttccagaaagtgaagggatttggaggggccatgacagatgctgctgctctcaacatccttgccctgtcaccccctgcccaaaatttgctacttaaatcgtacttctctgaagaaggaatcggatataacatcatccgggtacccatggccagctgtgacttctccatccgcacctacacctatgcagacacccctgatgatttccagttgcacaacttcagcctcccagaggaagataccaagctcaagatacccctgattcaccgagccctgcagttggcccagcgtcccgtttcactccttgccagcccctggacatcacccacttggctcaagaccaatggagcggtgaatgggaaggggtcactcaagggacagcccggagacatctaccaccagacctgggccagatactttgtgaagttcctggatgcctatgctgagcacaagttacagttctgggcagtgacagctgaaaatgagccttctgctgggctgttgagtggataccccttccagtgcctgggcttcacccctgaacatcagcgagacttcattgcccgtgacctaggtcctaccctcgccaacagtactcaccacaatgtccgcctactcatgctggatgaccaacgcttgctgctgccccactgggcaaaggtggtactgacagacccagaagcagctaaatatgttcatggcattgctgtacattggtacctggactttctggctccagccaaagccaccctaggggagacacaccgcctgttccccaacaccatgctctttgcctcagaggcctgtgtgggctccaagttctgggagcagagtgtgcggctaggctcctgggatcgagggatgcagtacagccacagcatcatcacgaacctcctgtaccatgtggtcggctggaccgactggaaccttgccctgaaccccgaaggaggacccaattgggtgcgtaactttgtcgacagtcccatcattgtagacatcaccaaggacacgttttacaaacagcccatgttctaccaccttggccacttcagcaagttcattcctgagggctcccagagagtggggctggttgccagtcagaagaacgacctggacgcagtggcactgatgcatcccgatggctctgctgttgtggtcgtgctaaaccgctcctctaaggatgtgcctcttaccatcaaggatcctgctgtgggcttcctggagacaatctcacctggctactccattcacacctacctgtggcgtcgccagtgatggagcagatactcaaggaggcactgggctcagcctgggcattaaagggacagagtcagctcacacgctgtctgtgactaaagagggcacagcagggccagtgtgagcttacagcgacgtaagcccaggggcaatggtttgggtgactcactttcccctctaggtggtgccaggggctggaggcccctagaaaaagatcagtaagccccagtgtccccccagcccccatgcttatgtgaacatgcgctgtgtgctgcttgctttggaaactgggcctgggtccaggcctagggtgagctcactgtccgtacaaacacaagatcagggctgagggtaaggaaaagaagagactaggaaagctgggcccaaaactggagactgtttgtctttcctggagatgcagaactgggcccgtggagcagcagtgtcagcatcagggcggaagccttaaagcagcagcgggtgtgcccaggcacccagatgattcctatggcaccagccaggaaaaatggcagctcttaaaggagaaaatgtttgagccca

SEQ ID NO: 1744 - protein, 536 aa, Homo sapiens; identical to SEQ ID NO: 1740

SEQ ID NO: 1745 - DNA, 2325 bp, Homo sapiens
  source 1..2325: mol_type = unassigned DNA
atcctgccttcagagtcttactgcgcggggccccagtctccagtcccgcccaggcgcctttgcaggctgcggtgggatttcgttttgcctccggttggggctgctgtttctcttcgccgacgagactctggaacccctgtggtcttctcttcatctaatgaccctgaggggatggagttttcaagtccttccagagaggaatgtcccaagcctttgagtagggtaagcatcatggctggcagcctcacaggattgcttctacttcaggcagtgtcgtgggcatcaggtgcccgcccctgcatccctaaaagcttcggctacagctcggtggtgtgtgtctgcaatgccacatactgtgactcctttgaccccccgacctttcctgcccttggtaccttcagccgctatgagagtacacgcagtgggcgacggatggagctgagtatggggcccatccaggctaatcacacgggcacaggcctgctactgaccctgcagccagaacagaagttccagaaagtgaagggatttggaggggccatgacagatgctgctgctctcaacatccttgccctgtcaccccctgcccaaaatttgctacttaaatcgtacttctctgaagaaggaatcggatataacatcatccgggtacccatggccagctgtgacttctccatccgcacctacacctatgcagacacccctgatgatttccagttgcacaacttcagcctcccagaggaagataccaagctcaagatacccctgattcaccgagccctgcagttggcccagcgtcccgtttcactccttgccagcccctggacatcacccacttggctcaagaccaatggagcggtgaatgggaaggggtcactcaagggacagcccggagacatctaccaccagacctgggccagatactttgtgaagttcctggatgcctatgctgagcacaagttacagttctgggcagtgacagctgaaaatgagccttctgctgggctgttgagtggataccccttccagtgcctgggcttcacccctgaacatcagcgagacttcattgcccgtgacctaggtcctaccctcgccaacagtactcaccacaatgtccgcctactcatgctggatgaccaacgcttgctgctgccccactgggcaaaggtggtactgacagacccagaagcagctaaatatgttcatggcattgctgtacattggtacctggactttctggctccagccaaagccaccctaggggagacacaccgcctgttccccaacaccatgctctttgcctcagaggcctgtgtgggctccaagttctgggagcagagtgtgcggctaggctcctgggatcgagggatgcagtacagccacagcatcatcacgaacctcctgtaccatgtggtcggctggaccgactggaaccttgccctgaaccccgaaggaggacccaattgggtgcgtaactttgtcgacagtcccatcattgtagacatcaccaaggacacgttttacaaacagcccatgttctaccaccttggccacttcagcaagttcattcctgagggctcccagagagtggggctggttgccagtcagaagaacgacctggacgcagtggcactgatgcatcccgatggctctgctgttgtggtcgtgctaaaccgctcctctaaggatgtgcctcttaccatcaaggatcctgctgtgggcttcctggagacaatctcacctggctactccattcacacctacctgtggcgtcgccagtgatggagcagatactcaaggaggcactgggctcagcctgggcattaaagggacagagtcagctcacacgctgtctgtgactaaagagggcacagcagggccagtgtgagcttacagcgacgtaagcccaggggcaatggtttgggtgactcactttcccctctaggtggtgccaggggctggaggcccctagaaaaagatcagtaagccccagtgtccccccagcccccatgcttatgtgaacatgcgctgtgtgctgcttgctttggaaactgggcctgggtccaggcctagggtgagctcactgtccgtacaaacacaagatcagggctgagggtaaggaaaagaagagactaggaaagctgggcccaaaactggagactgtttgtctttcctggagatgcagaactgggcccgtggagcagcagtgtcagcatcagggcggaagccttaaagcagcagcgggtgtgcccaggcacccagatgattcctatggcaccagccaggaaaaatggcagctcttaaaggagaaaatgtttgagccca

SEQ ID NO: 1746 - protein, 449 aa, Homo sapiens
MELSMGPIQANHTGTGLLLTLQPEQKFQKVKGFGGAMTDAAALNILALSPPAQNLLLKSYFSEEGIGYNIIRVPMASCDFSIRTYTYADTPDDFQLHNFSLPEEDTKLKIPLIHRALQLAQRPVSLLASPWTSPTWLKTNGAVNGKGSLKGQPGDIYHQTWARYFVKFLDAYAEHKLQFWAVTAENEPSAGLLSGYPFQCLGFTPEHQRDFIARDLGPTLANSTHHNVRLLMLDDQRLLLPHWAKVVLTDPEAAKYVHGIAVHWYLDFLAPAKATLGETHRLFPNTMLFASEACVGSKFWEQSVRLGSWDRGMQYSHSIITNLLYHVVGWTDWNLALNPEGGPNWVRNFVDSPIIVDITKDTFYKQPMFYHLGHFSKFIPEGSQRVGLVASQKNDLDAVALMHPDGSAVVVVLNRSSKDVPLTIKDPAVGFLETISPGYSIHTYLWRRQ

SEQ ID NO: 1747 - DNA, 2161 bp, Homo sapiens
  source 1..2161: mol_type = unassigned DNA
atcctgccttcagagtcttactgcgcggggccccagtctccagtcccgcccaggcgcctttgcaggctgcggtgggatttcgttttgcctccggttggggctgctgtttctcttcgccgacggtgcccgcccctgcatccctaaaagcttcggctacagctcggtggtgtgtgtctgcaatgccacatactgtgactcctttgaccccccgacctttcctgcccttggtaccttcagccgctatgagagtacacgcagtgggcgacggatggagctgagtatggggcccatccaggctaatcacacgggcacaggcctgctactgaccctgcagccagaacagaagttccagaaagtgaagggatttggaggggccatgacagatgctgctgctctcaacatccttgccctgtcaccccctgcccaaaatttgctacttaaatcgtacttctctgaagaaggaatcggatataacatcatccgggtacccatggccagctgtgacttctccatccgcacctacacctatgcagacacccctgatgatttccagttgcacaacttcagcctcccagaggaagataccaagctcaagatacccctgattcaccgagccctgcagttggcccagcgtcccgtttcactccttgccagcccctggacatcacccacttggctcaagaccaatggagcggtgaatgggaaggggtcactcaagggacagcccggagacatctaccaccagacctgggccagatactttgtgaagttcctggatgcctatgctgagcacaagttacagttctgggcagtgacagctgaaaatgagccttctgctgggctgttgagtggataccccttccagtgcctgggcttcacccctgaacatcagcgagacttcattgcccgtgacctaggtcctaccctcgccaacagtactcaccacaatgtccgcctactcatgctggatgaccaacgcttgctgctgccccactgggcaaaggtggtactgacagacccagaagcagctaaatatgttcatggcattgctgtacattggtacctggactttctggctccagccaaagccaccctaggggagacacaccgcctgttccccaacaccatgctctttgcctcagaggcctgtgtgggctccaagttctgggagcagagtgtgcggctaggctcctgggatcgagggatgcagtacagccacagcatcatcacgaacctcctgtaccatgtggtcggctggaccgactggaaccttgccctgaaccccgaaggaggacccaattgggtgcgtaactttgtcgacagtcccatcattgtagacatcaccaaggacacgttttacaaacagcccatgttctaccaccttggccacttcagcaagttcattcctgagggctcccagagagtggggctggttgccagtcagaagaacgacctggacgcagtggcactgatgcatcccgatggctctgctgttgtggtcgtgctaaaccgctcctctaaggatgtgcctcttaccatcaaggatcctgctgtgggcttcctggagacaatctcacctggctactccattcacacctacctgtggcgtcgccagtgatggagcagatactcaaggaggcactgggctcagcctgggcattaaagggacagagtcagctcacacgctgtctgtgactaaagagggcacagcagggccagtgtgagcttacagcgacgtaagcccaggggcaatggtttgggtgactcactttcccctctaggtggtgccaggggctggaggcccctagaaaaagatcagtaagccccagtgtccccccagcccccatgcttatgtgaacatgcgctgtgtgctgcttgctttggaaactgggcctgggtccaggcctagggtgagctcactgtccgtacaaacacaagatcagggctgagggtaaggaaaagaagagactaggaaagctgggcccaaaactggagactgtttgtctttcctggagatgcagaactgggcccgtggagcagcagtgtcagcatcagggcggaagccttaaagcagcagcgggtgtgcccaggcacccagatgattcctatggcaccagccaggaaaaatggcagctcttaaaggagaaaatgtttgagccca

SEQ ID NO: 1748 - protein, 487 aa, Homo sapiens
MEFSSPSREECPKPLSRVSIMAGSLTGLLLLQAVSWASGARPCIPKSFGYSSVVCVCNATYCDSFDPPTFPALGTFSRYESTRSGRRMELSMGPIQANHTGTGIGYNIIRVPMASCDFSIRTYTYADTPDDFQLHNFSLPEEDTKLKIPLIHRALQLAQRPVSLLASPWTSPTWLKTNGAVNGKGSLKGQPGDIYHQTWARYFVKFLDAYAEHKLQFWAVTAENEPSAGLLSGYPFQCLGFTPEHQRDFIARDLGPTLANSTHHNVRLLMLDDQRLLLPHWAKVVLTDPEAAKYVHGIAVHWYLDFLAPAKATLGETHRLFPNTMLFASEACVGSKFWEQSVRLGSWDRGMQYSHSIITNLLYHVVGWTDWNLALNPEGGPNWVRNFVDSPIIVDITKDTFYKQPMFYHLGHFSKFIPEGSQRVGLVASQKNDLDAVALMHPDGSAVVVVLNRSSKDVPLTIKDPAVGFLETISPGYSIHTYLWRRQ

SEQ ID NO: 1749 - DNA, 2144 bp, Homo sapiens
  source 1..2144: mol_type = unassigned DNA
ggaattacttgcagggctaacctagtgcctatagctaaggcaggtacctgcatccttgtttttgtttagtggatcctctatccttcagagactctggaacccctgtggtcttctcttcatctaatgaccctgaggggatggagttttcaagtccttccagagaggaatgtcccaagcctttgagtagggtaagcatcatggctggcagcctcacaggattgcttctacttcaggcagtgtcgtgggcatcaggtgcccgcccctgcatccctaaaagcttcggctacagctcggtggtgtgtgtctgcaatgccacatactgtgactcctttgaccccccgacctttcctgcccttggtaccttcagccgctatgagagtacacgcagtgggcgacggatggagctgagtatggggcccatccaggctaatcacacgggcacaggaatcggatataacatcatccgggtacccatggccagctgtgacttctccatccgcacctacacctatgcagacacccctgatgatttccagttgcacaacttcagcctcccagaggaagataccaagctcaagatacccctgattcaccgagccctgcagttggcccagcgtcccgtttcactccttgccagcccctggacatcacccacttggctcaagaccaatggagcggtgaatgggaaggggtcactcaagggacagcccggagacatctaccaccagacctgggccagatactttgtgaagttcctggatgcctatgctgagcacaagttacagttctgggcagtgacagctgaaaatgagccttctgctgggctgttgagtggataccccttccagtgcctgggcttcacccctgaacatcagcgagacttcattgcccgtgacctaggtcctaccctcgccaacagtactcaccacaatgtccgcctactcatgctggatgaccaacgcttgctgctgccccactgggcaaaggtggtactgacagacccagaagcagctaaatatgttcatggcattgctgtacattggtacctggactttctggctccagccaaagccaccctaggggagacacaccgcctgttccccaacaccatgctctttgcctcagaggcctgtgtgggctccaagttctgggagcagagtgtgcggctaggctcctgggatcgagggatgcagtacagccacagcatcatcacgaacctcctgtaccatgtggtcggctggaccgactggaaccttgccctgaaccccgaaggaggacccaattgggtgcgtaactttgtcgacagtcccatcattgtagacatcaccaaggacacgttttacaaacagcccatgttctaccaccttggccacttcagcaagttcattcctgagggctcccagagagtggggctggttgccagtcagaagaacgacctggacgcagtggcactgatgcatcccgatggctctgctgttgtggtcgtgctaaaccgctcctctaaggatgtgcctcttaccatcaaggatcctgctgtgggcttcctggagacaatctcacctggctactccattcacacctacctgtggcgtcgccagtgatggagcagatactcaaggaggcactgggctcagcctgggcattaaagggacagagtcagctcacacgctgtctgtgactaaagagggcacagcagggccagtgtgagcttacagcgacgtaagcccaggggcaatggtttgggtgactcactttcccctctaggtggtgccaggggctggaggcccctagaaaaagatcagtaagccccagtgtccccccagcccccatgcttatgtgaacatgcgctgtgtgctgcttgctttggaaactgggcctgggtccaggcctagggtgagctcactgtccgtacaaacacaagatcagggctgagggtaaggaaaagaagagactaggaaagctgggcccaaaactggagactgtttgtctttcctggagatgcagaactgggcccgtggagcagcagtgtcagcatcagggcggaagccttaaagcagcagcgggtgtgcccaggcacccagatgattcctatggcaccagccaggaaaaatggcagctcttaaaggagaaaatgtttgagccca

SEQ ID NO: 1750 - protein, 524 aa, Homo sapiens
MYALFLLASLLGAALAGPVLGLKECTRGSAVWCQNVKTASDCGAVKHCLQTVWNKPTVKSLPCDICKDVVTAAGDMLKDNATEEEILVYLEKTCDWLPKPNMSASCKEIVDSYLPVILDIIKGEMSRPGEVCSALNLCESLQKHLAELNHQKQLESNKIPELDMTEVVAPFMANIPLLLYPQDGPRSKPQPKDNGDVCQDCIQMVTDIQTAVRTNSTFVQALVEHVKEECDRLGPGMADICKNYISQYSEIAIQMMMHMQPKEICALVGFCDEVKEMPMQTLVPAKVASKNVIPALELVEPIKKHEVPAKSDVYCEVCEFLVKEVTKLIDNNKTEKEILDAFDKMCSKLPKSLSEECQEVVDTYGSSILSILLEEVSPELVCSMLHLCSGTRLPALTVHVTQPKDGGFCEVCKKLVGYLDRNLEKNSTKQEILAALEKGCSFLPDPYQKQCDQFVAEYEPVLIEILVEVMDPSFVCLKIGACPSAHKPLLGTEKCIWGPSYWCQNTETAAQCNAVEHCKRHVWN

SEQ ID NO: 1751 - DNA, 2748 bp, Homo sapiens
  source 1..2748: mol_type = unassigned DNA
gcattgcagactgcggagtcagacggcgctatgtacgccctcttcctcctggccagcctcctgggcgcggctctagccggcccggtccttggactgaaagaatgcaccaggggctcggcagtgtggtgccagaatgtgaagacggcgtccgactgcggggcagtgaagcactgcctgcagaccgtttggaacaagccaacagtgaaatcccttccctgcgacatatgcaaagacgttgtcaccgcagctggtgatatgctgaaggacaatgccactgaggaggagatccttgtttacttggagaagacctgtgactggcttccgaaaccgaacatgtctgcttcatgcaaggagatagtggactcctacctccctgtcatcctggacatcattaaaggagaaatgagccgtcctggggaggtgtgctctgctctcaacctctgcgagtctctccagaagcacctagcagagctgaatcaccagaagcagctggagtccaataagatcccagagctggacatgactgaggtggtggcccccttcatggccaacatccctctcctcctctaccctcaggacggcccccgcagcaagccccagccaaaggataatggggacgtttgccaggactgcattcagatggtgactgacatccagactgctgtacggaccaactccacctttgtccaggccttggtggaacatgtcaaggaggagtgtgaccgcctgggccctggcatggccgacatatgcaagaactatatcagccagtattctgaaattgctatccagatgatgatgcacatgcaacccaaggagatctgtgcgctggttgggttctgtgatgaggtgaaagagatgcccatgcagactctggtccccgccaaagtggcctccaagaatgtcatccctgccctggaactggtggagcccattaagaagcacgaggtcccagcaaagtctgatgtttactgtgaggtgtgtgaattcctggtgaaggaggtgaccaagctgattgacaacaacaagactgagaaagaaatactcgacgcttttgacaaaatgtgctcgaagctgccgaagtccctgtcggaagagtgccaggaggtggtggacacgtacggcagctccatcctgtccatcctgctggaggaggtcagccctgagctggtgtgcagcatgctgcacctctgctctggcacgcggctgcctgcactgaccgttcacgtgactcagccaaaggacggtggcttctgcgaagtgtgcaagaagctggtgggttatttggatcgcaacctggagaaaaacagcaccaagcaggagatcctggctgctcttgagaaaggctgcagcttcctgccagacccttaccagaagcagtgtgatcagtttgtggcagagtacgagcccgtgctgatcgagatcctggtggaggtgatggatccttccttcgtgtgcttgaaaattggagcctgcccctcggcccataagcccttgttgggaactgagaagtgtatatggggcccaagctactggtgccagaacacagagacagcagcccagtgcaatgctgtcgagcattgcaaacgccatgtgtggaactaggaggaggaatattccatcttggcagaaaccacagcattggtttttttctacttgtgtgtctgggggaatgaacgcacagatctgtttgactttgttataaaaatagggctcccccacctcccccatttctgtgtcctttattgtagcattgctgtctgcaagggagcccctagcccctggcagacatagctgcttcagtgccccttttctctctgctagatggatgttgatgcactggaggtcttttagcctgcccttgcatggcgcctgctggaggaggagagagctctgctggcatgagccacagtttcttgactggaggccatcaaccctcttggttgaggccttgttctgagccctgacatgtgcttgggcactggtgggcctgggcttctgaggtggcctcctgccctgatcagggaccctccccgctttcctgggcctctcagttgaacaaagcagcaaaacaaaggcagttttatatgaaagattagaagcctggaataatcaggctttttaaatgatgtaattcccactgtaatagcatagggattttggaagcagctgctggtggcttgggacatcagtggggccaagggttctctgtccctggttcaactgtgatttggctttcccgtgtctttcctggtgatgccttgtttggggttctgtgggtttgggtgggaagagggccatctgcctgaatgtaacctgctagctctccgaaggccctgcgggcctggcttgtgtgagcgtgtggacagtggtggccgcgctgtgcctgctcgtgttgcctacatgtccctggctgttgaggcgctgcttcagcctgcacccctcccttgtctcatagatgctccttttgaccttttcaaataaatatggatggcgagctcctaggcctctggcttcctggtagagggcggcatgccgaagggtctgctgggtgtggattggatgctggggtgtgggggttggaagctgtctgtggcccacttgggcacccacgcttctgtccacttctggttgccaggagacagcaagcaaagccagcaggacatgaagttgctattaaatggacttcgtgatttttgttttgcactaaagtttctgtgatttaacaataaaattctgttagccaga

SEQ ID NO: 1752 - protein, 527 aa, Homo sapiens
MYALFLLASLLGAALAGPVLGLKECTRGSAVWCQNVKTASDCGAVKHCLQTVWNKPTVKSLPCDICKDVVTAAGDMLKDNATEEEILVYLEKTCDWLPKPNMSASCKEIVDSYLPVILDIIKGEMSRPGEVCSALNLCESLQKHLAELNHQKQLESNKIPELDMTEVVAPFMANIPLLLYPQDGPRSKPQPKDNGDVCQDCIQMVTDIQTAVRTNSTFVQALVEHVKEECDRLGPGMADICKNYISQYSEIAIQMMMHMQDQQPKEICALVGFCDEVKEMPMQTLVPAKVASKNVIPALELVEPIKKHEVPAKSDVYCEVCEFLVKEVTKLIDNNKTEKEILDAFDKMCSKLPKSLSEECQEVVDTYGSSILSILLEEVSPELVCSMLHLCSGTRLPALTVHVTQPKDGGFCEVCKKLVGYLDRNLEKNSTKQEILAALEKGCSFLPDPYQKQCDQFVAEYEPVLIEILVEVMDPSFVCLKIGACPSAHKPLLGTEKCIWGPSYWCQNTETAAQCNAVEHCKRHVWN

SEQ ID NO: 1753 - DNA, 2757 bp, Homo sapiens
  source 1..2757: mol_type = unassigned DNA
gcattgcagactgcggagtcagacggcgctatgtacgccctcttcctcctggccagcctcctgggcgcggctctagccggcccggtccttggactgaaagaatgcaccaggggctcggcagtgtggtgccagaatgtgaagacggcgtccgactgcggggcagtgaagcactgcctgcagaccgtttggaacaagccaacagtgaaatcccttccctgcgacatatgcaaagacgttgtcaccgcagctggtgatatgctgaaggacaatgccactgaggaggagatccttgtttacttggagaagacctgtgactggcttccgaaaccgaacatgtctgcttcatgcaaggagatagtggactcctacctccctgtcatcctggacatcattaaaggagaaatgagccgtcctggggaggtgtgctctgctctcaacctctgcgagtctctccagaagcacctagcagagctgaatcaccagaagcagctggagtccaataagatcccagagctggacatgactgaggtggtggcccccttcatggccaacatccctctcctcctctaccctcaggacggcccccgcagcaagccccagccaaaggataatggggacgtttgccaggactgcattcagatggtgactgacatccagactgctgtacggaccaactccacctttgtccaggccttggtggaacatgtcaaggaggagtgtgaccgcctgggccctggcatggccgacatatgcaagaactatatcagccagtattctgaaattgctatccagatgatgatgcacatgcaggatcagcaacccaaggagatctgtgcgctggttgggttctgtgatgaggtgaaagagatgcccatgcagactctggtccccgccaaagtggcctccaagaatgtcatccctgccctggaactggtggagcccattaagaagcacgaggtcccagcaaagtctgatgtttactgtgaggtgtgtgaattcctggtgaaggaggtgaccaagctgattgacaacaacaagactgagaaagaaatactcgacgcttttgacaaaatgtgctcgaagctgccgaagtccctgtcggaagagtgccaggaggtggtggacacgtacggcagctccatcctgtccatcctgctggaggaggtcagccctgagctggtgtgcagcatgctgcacctctgctctggcacgcggctgcctgcactgaccgttcacgtgactcagccaaaggacggtggcttctgcgaagtgtgcaagaagctggtgggttatttggatcgcaacctggagaaaaacagcaccaagcaggagatcctggctgctcttgagaaaggctgcagcttcctgccagacccttaccagaagcagtgtgatcagtttgtggcagagtacgagcccgtgctgatcgagatcctggtggaggtgatggatccttccttcgtgtgcttgaaaattggagcctgcccctcggcccataagcccttgttgggaactgagaagtgtatatggggcccaagctactggtgccagaacacagagacagcagcccagtgcaatgctgtcgagcattgcaaacgccatgtgtggaactaggaggaggaatattccatcttggcagaaaccacagcattggtttttttctacttgtgtgtctgggggaatgaacgcacagatctgtttgactttgttataaaaatagggctcccccacctcccccatttctgtgtcctttattgtagcattgctgtctgcaagggagcccctagcccctggcagacatagctgcttcagtgccccttttctctctgctagatggatgttgatgcactggaggtcttttagcctgcccttgcatggcgcctgctggaggaggagagagctctgctggcatgagccacagtttcttgactggaggccatcaaccctcttggttgaggccttgttctgagccctgacatgtgcttgggcactggtgggcctgggcttctgaggtggcctcctgccctgatcagggaccctccccgctttcctgggcctctcagttgaacaaagcagcaaaacaaaggcagttttatatgaaagattagaagcctggaataatcaggctttttaaatgatgtaattcccactgtaatagcatagggattttggaagcagctgctggtggcttgggacatcagtggggccaagggttctctgtccctggttcaactgtgatttggctttcccgtgtctttcctggtgatgccttgtttggggttctgtgggtttgggtgggaagagggccatctgcctgaatgtaacctgctagctctccgaaggccctgcgggcctggcttgtgtgagcgtgtggacagtggtggccgcgctgtgcctgctcgtgttgcctacatgtccctggctgttgaggcgctgcttcagcctgcacccctcccttgtctcatagatgctccttttgaccttttcaaataaatatggatggcgagctcctaggcctctggcttcctggtagagggcggcatgccgaagggtctgctgggtgtggattggatgctggggtgtgggggttggaagctgtctgtggcccacttgggcacccacgcttctgtccacttctggttgccaggagacagcaagcaaagccagcaggacatgaagttgctattaaatggacttcgtgatttttgttttgcactaaagtttctgtgatttaacaataaaattctgttagccaga

SEQ ID NO: 1754 - protein, 526 aa, Homo sapiens
MYALFLLASLLGAALAGPVLGLKECTRGSAVWCQNVKTASDCGAVKHCLQTVWNKPTVKSLPCDICKDVVTAAGDMLKDNATEEEILVYLEKTCDWLPKPNMSASCKEIVDSYLPVILDIIKGEMSRPGEVCSALNLCESLQKHLAELNHQKQLESNKIPELDMTEVVAPFMANIPLLLYPQDGPRSKPQPKDNGDVCQDCIQMVTDIQTAVRTNSTFVQALVEHVKEECDRLGPGMADICKNYISQYSEIAIQMMMHMDQQPKEICALVGFCDEVKEMPMQTLVPAKVASKNVIPALELVEPIKKHEVPAKSDVYCEVCEFLVKEVTKLIDNNKTEKEILDAFDKMCSKLPKSLSEECQEVVDTYGSSILSILLEEVSPELVCSMLHLCSGTRLPALTVHVTQPKDGGFCEVCKKLVGYLDRNLEKNSTKQEILAALEKGCSFLPDPYQKQCDQFVAEYEPVLIEILVEVMDPSFVCLKIGACPSAHKPLLGTEKCIWGPSYWCQNTETAAQCNAVEHCKRHVWN

SEQ ID NO: 1755 - DNA, 2754 bp, Homo sapiens
  source 1..2754: mol_type = unassigned DNA
gcattgcagactgcggagtcagacggcgctatgtacgccctcttcctcctggccagcctcctgggcgcggctctagccggcccggtccttggactgaaagaatgcaccaggggctcggcagtgtggtgccagaatgtgaagacggcgtccgactgcggggcagtgaagcactgcctgcagaccgtttggaacaagccaacagtgaaatcccttccctgcgacatatgcaaagacgttgtcaccgcagctggtgatatgctgaaggacaatgccactgaggaggagatccttgtttacttggagaagacctgtgactggcttccgaaaccgaacatgtctgcttcatgcaaggagatagtggactcctacctccctgtcatcctggacatcattaaaggagaaatgagccgtcctggggaggtgtgctctgctctcaacctctgcgagtctctccagaagcacctagcagagctgaatcaccagaagcagctggagtccaataagatcccagagctggacatgactgaggtggtggcccccttcatggccaacatccctctcctcctctaccctcaggacggcccccgcagcaagccccagccaaaggataatggggacgtttgccaggactgcattcagatggtgactgacatccagactgctgtacggaccaactccacctttgtccaggccttggtggaacatgtcaaggaggagtgtgaccgcctgggccctggcatggccgacatatgcaagaactatatcagccagtattctgaaattgctatccagatgatgatgcacatggatcagcaacccaaggagatctgtgcgctggttgggttctgtgatgaggtgaaagagatgcccatgcagactctggtccccgccaaagtggcctccaagaatgtcatccctgccctggaactggtggagcccattaagaagcacgaggtcccagcaaagtctgatgtttactgtgaggtgtgtgaattcctggtgaaggaggtgaccaagctgattgacaacaacaagactgagaaagaaatactcgacgcttttgacaaaatgtgctcgaagctgccgaagtccctgtcggaagagtgccaggaggtggtggacacgtacggcagctccatcctgtccatcctgctggaggaggtcagccctgagctggtgtgcagcatgctgcacctctgctctggcacgcggctgcctgcactgaccgttcacgtgactcagccaaaggacggtggcttctgcgaagtgtgcaagaagctggtgggttatttggatcgcaacctggagaaaaacagcaccaagcaggagatcctggctgctcttgagaaaggctgcagcttcctgccagacccttaccagaagcagtgtgatcagtttgtggcagagtacgagcccgtgctgatcgagatcctggtggaggtgatggatccttccttcgtgtgcttgaaaattggagcctgcccctcggcccataagcccttgttgggaactgagaagtgtatatggggcccaagctactggtgccagaacacagagacagcagcccagtgcaatgctgtcgagcattgcaaacgccatgtgtggaactaggaggaggaatattccatcttggcagaaaccacagcattggtttttttctacttgtgtgtctgggggaatgaacgcacagatctgtttgactttgttataaaaatagggctcccccacctcccccatttctgtgtcctttattgtagcattgctgtctgcaagggagcccctagcccctggcagacatagctgcttcagtgccccttttctctctgctagatggatgttgatgcactggaggtcttttagcctgcccttgcatggcgcctgctggaggaggagagagctctgctggcatgagccacagtttcttgactggaggccatcaaccctcttggttgaggccttgttctgagccctgacatgtgcttgggcactggtgggcctgggcttctgaggtggcctcctgccctgatcagggaccctccccgctttcctgggcctctcagttgaacaaagcagcaaaacaaaggcagttttatatgaaagattagaagcctggaataatcaggctttttaaatgatgtaattcccactgtaatagcatagggattttggaagcagctgctggtggcttgggacatcagtggggccaagggttctctgtccctggttcaactgtgatttggctttcccgtgtctttcctggtgatgccttgtttggggttctgtgggtttgggtgggaagagggccatctgcctgaatgtaacctgctagctctccgaaggccctgcgggcctggcttgtgtgagcgtgtggacagtggtggccgcgctgtgcctgctcgtgttgcctacatgtccctggctgttgaggcgctgcttcagcctgcacccctcccttgtctcatagatgctccttttgaccttttcaaataaatatggatggcgagctcctaggcctctggcttcctggtagagggcggcatgccgaagggtctgctgggtgtggattggatgctggggtgtgggggttggaagctgtctgtggcccacttgggcacccacgcttctgtccacttctggttgccaggagacagcaagcaaagccagcaggacatgaagttgctattaaatggacttcgtgatttttgttttgcactaaagtttctgtgatttaacaataaaattctgttagccaga

SEQ ID NO: 1756 - protein, 81 aa, Homo sapiens
SLPCDICKDVVTAAGDMLKDNATEEEILVYLEKTCDWLPKPNMSASCKEIVDSYLPVILDIIKGEMSRPGEVCSALNLCES

SEQ ID NO: 1757 - protein, 81 aa, Homo sapiens
GDVCQDCIQMVTDIQTAVRTNSTFVQALVEHVKEECDRLGPGMADICKNYISQYSEIAIQMMMHMQPKEICALVGFCDEVK

SEQ ID NO: 1758 - protein, 80 aa, Homo sapiens
SDVYCEVCEFLVKEVTKLIDNNKTEKEILDAFDKMCSKLPKSLSEECQEVVDTYGSSILSILLEEVSPELVCSMLHLCSG

SEQ ID NO: 1759 - DNA, 3413 bp, synthetic construct
  misc_feature 1..3413: note = source = /note="Description of Artificial Sequence: Synthetic polynucleotide"
  source 1..3413: mol_type = other DNA
ctgcgcgctcgctcgctcactgaggccgcccgggcaaagcccgggcgtcgggcgacctttggtcgcccggcctcagtgagcgagcgagcgcgcagagagggagtggccaactccatcactaggggttccttgtagttaatgattaacccgccatgctacttatctaccagggtaatggggatcctctagaactatagctagtcgacattgattattgactagttattaatagtaatcaattacggggtcattagttcatagcccatatatggagttccgcgttacataacttacggtaaatggcccgcctggctgaccgcccaacgacccccgcccattgacgtcaataatgacgtatgttcccatagtaacgccaatagggactttccattgacgtcaatgggtggagtatttacggtaaactgcccacttggcagtacatcaagtgtatcatatgccaagtacgccccctattgacgtcaatgacggtaaatggcccgcctggcattatgcccagtacatgaccttatgggactttcctacttggcagtacatctacgtattagtcatcgctattaccatgtcgaggccacgttctgcttcactctccccatctcccccccctccccacccccaattttgtatttatttattttttaattattttgtgcagcgatgggggcggggggggggggcgcgcgccaggcggggcggggcggggcgaggggcggggcggggcgaggcggagaggtgcggcggcagccaatcagagcggcgcgctccgaaagtttccttttatggcgaggcggcggcggcggcggccctataaaaagcgaagcgcgcggcgggcgggagcaagcttcgtttagtgaaccgtcagatcgcctggagacgccatccacgctgttttgacctccatagaagacaccgggaccgatccagcctccgcggattcgaatcccggccgggaacggtgcattggaacgcggattccccgtgccaagagtgacgtaagtaccgcctatagagtctataggcccacaaaaaatgctttcttcttttaatatacttttttgtttatcttatttctaatactttccctaatctctttctttcagggcaataatgatacaatgtatcatgcctctttgcaccattctaaagaataacagtgataatttctgggttaaggcaatagcaatatttctgcatataaatatttctgcatataaattgtaactgatgtaagaggtttcatattgctaatagcagctacaatccagctaccattctgcttttattttatggttgggataaggctggattattctgagtccaagctaggcccttttgctaatcatgttcatacctcttatcttcctcccacagctcctgggcaacgtgctggtctgtgtgctggcccatcactttggcaaagaattgggattcgaaccggtgccgccaccatggaattcagcagccccagcagagaggaatgccccaagcctctgagccgggtgtcaatcatggccggatctctgacaggactgctgctgcttcaggccgtgtcttgggcttctggcgctagaccttgcatccccaagagcttcggctacagcagcgtcgtgtgcgtgtgcaatgccacctactgcgacagcttcgaccctcctacctttcctgctctgggcaccttcagcagatacgagagcaccagatccggcagacggatggaactgagcatgggacccatccaggccaatcacacaggcactggcctgctgctgacactgcagcctgagcagaaattccagaaagtgaaaggcttcggcggagccatgacagatgccgccgctctgaatatcctggctctgtctccaccagctcagaacctgctgctcaagagctacttcagcgaggaaggcatcggctacaacatcatcagagtgcccatggccagctgcgacttcagcatcaggacctacacctacgccgacacacccgacgatttccagctgcacaacttcagcctgcctgaagaggacaccaagctgaagatccctctgatccacagagccctgcagctggcacaaagacccgtgtcactgctggcctctccatggacatctcccacctggctgaaaacaaatggcgccgtgaatggcaagggcagcctgaaaggccaacctggcgacatctaccaccagacctgggccagatacttcgtgaagttcctggacgcctatgccgagcacaagctgcagttttgggccgtgacagccgagaacgaaccttctgctggactgctgagcggctacccctttcagtgcctgggctttacacccgagcaccagcgggactttatcgcccgtgatctgggacccacactggccaatagcacccaccataatgtgcggctgctgatgctggacgaccagagactgcttctgccccactgggctaaagtggtgctgacagatcctgaggccgccaaatacgtgcacggaatcgccgtgcactggtatctggactttctggcccctgccaaggccacactgggagagacacacagactgttccccaacaccatgctgttcgccagcgaagcctgtgtgggcagcaagttttgggaacagagcgtgcggctcggcagctgggatagaggcatgcagtacagccacagcatcatcaccaacctgctgtaccacgtcgtcggctggaccgactggaatctggccctgaatcctgaaggcggccctaactgggtccgaaacttcgtggacagccccatcatcgtggacatcaccaaggacaccttctacaagcagcccatgttctaccacctgggacacttcagcaagttcatccccgagggctctcagcgcgttggactggtggcttcccagaagaacgatctggacgccgtggctctgatgcaccctgatggatctgctgtggtggtggtcctgaaccgcagcagcaaagatgtgcccctgaccatcaaggatcccgccgtgggattcctggaaacaatcagccctggctactccatccacacctacctgtggcgtagacagtagtaactcgaggacggggtgaactacgcctgaggatccgatctttttccctctgccaaaaattatggggacatcatgaagccccttgagcatctgacttctggctaataaaggaaatttattttcattgcaatagtgtgttggaattttttgtgtctctcactcggcctaggtagataagtagcatggcgggttaatcattaactacaaggaacccctagtgatggagttggccactccctctctgcgcgctcgctcgctcactgaggccgggcgaccaaaggtcgcccgacgcccgggctttgcccgggcggcctcagtgagcgagcgagcgcgcag

SEQ ID NO: 1760 - DNA, 3428 bp, synthetic construct
  misc_feature 1..3428: note = source = /note="Description of Artificial Sequence: Synthetic polynucleotide"
  source 1..3428: mol_type = other DNA
ctgcgcgctcgctcgctcactgaggccgcccgggcaaagcccgggcgtcgggcgacctttggtcgcccggcctcagtgagcgagcgagcgcgcagagagggagtggccaactccatcactaggggttccttgtagttaatgattaacccgccatgctacttatctaccagggtaatggggatcctctagaactatagctagtcgacattgattattgactagttattaatagtaatcaattacggggtcattagttcatagcccatatatggagttccgcgttacataacttacggtaaatggcccgcctggctgaccgcccaacgacccccgcccattgacgtcaataatgacgtatgttcccatagtaacgccaatagggactttccattgacgtcaatgggtggagtatttacggtaaactgcccacttggcagtacatcaagtgtatcatatgccaagtacgccccctattgacgtcaatgacggtaaatggcccgcctggcattatgcccagtacatgaccttatgggactttcctacttggcagtacatctacgtattagtcatcgctattaccatgtcgaggccacgttctgcttcactctccccatctcccccccctccccacccccaattttgtatttatttattttttaattattttgtgcagcgatgggggcggggggggggggcgcgcgccaggcggggcggggcggggcgaggggcggggcggggcgaggcggagaggtgcggcggcagccaatcagagcggcgcgctccgaaagtttccttttatggcgaggcggcggcggcggcggccctataaaaagcgaagcgcgcggcgggcgggagcaagcttcgtttagtgaaccgtcagatcgcctggagacgccatccacgctgttttgacctccatagaagacaccgggaccgatccagcctccgcggattcgaatcccggccgggaacggtgcattggaacgcggattccccgtgccaagagtgacgtaagtaccgcctatagagtctataggcccacaaaaaatgctttcttcttttaatatacttttttgtttatcttatttctaatactttccctaatctctttctttcagggcaataatgatacaatgtatcatgcctctttgcaccattctaaagaataacagtgataatttctgggttaaggcaatagcaatatttctgcatataaatatttctgcatataaattgtaactgatgtaagaggtttcatattgctaatagcagctacaatccagctaccattctgcttttattttatggttgggataaggctggattattctgagtccaagctaggcccttttgctaatcatgttcatacctcttatcttcctcccacagctcctgggcaacgtgctggtctgtgtgctggcccatcactttggcaaagaattgggattcgaaccggtgccgccaccatggaattcagcagccccagcagagaggaatgccccaagcctctgagccgggtgtcaatcatggccggatctctgacaggactgctgctgcttcaggccgtgtcttgggcttctggcgctagaccttgcatccccaagagcttcggctacagcagcgtcgtgtgcgtgtgcaatgccacctactgcgacagcttcgaccctcctacctttcctgctctgggcaccttcagcagatacgagagcaccagatccggcagacggatggaactgagcatgggacccatccaggccaatcacacaggcactggcctgctgctgacactgcagcctgagcagaaattccagaaagtgaaaggcttcggcggagccatgacagatgccgccgctctgaatatcctggctctgtctccaccagctcagaacctgctgctcaagagctacttcagcgaggaaggcatcggctacaacatcatcagagtgcccatggccagctgcgacttcagcatcaggacctacacctacgccgacacacccgacgatttccagctgcacaacttcagcctgcctgaagaggacaccaagctgaagatccctctgatccacagagccctgcagctggcacaaagacccgtgtcactgctggcctctccatggacatctcccacctggctgaaaacaaatggcgccgtgaatggcaagggcagcctgaaaggccaacctggcgacatctaccaccagacctgggccagatacttcgtgaagttcctggacgcctatgccgagcacaagctgcagttttgggccgtgacagccgagaacgaaccttctgctggactgctgagcggctacccctttcagtgcctgggctttacacccgagcaccagcgggactttatcgcccgtgatctgggacccacactggccaatagcacccaccataatgtgcggctgctgatgctggacgaccagagactgcttctgccccactgggctaaagtggtgctgacagatcctgaggccgccaaatacgtgcacggaatcgccgtgcactggtatctggactttctggcccctgccaaggccacactgggagagacacacagactgttccccaacaccatgctgttcgccagcgaagcctgtgtgggcagcaagttttgggaacagagcgtgcggctcggcagctgggatagaggcatgcagtacagccacagcatcatcaccaacctgctgtaccacgtcgtcggctggaccgactggaatctggccctgaatcctgaaggcggccctaactgggtccgaaacttcgtggacagccccatcatcgtggacatcaccaaggacaccttctacaagcagcccatgttctaccacctgggacacttcagcaagttcatccccgagggctctcagcgcgttggactggtggcttcccagaagaacgatctggacgccgtggctctgatgcaccctgatggatctgctgtggtggtggtcctgaaccgcagcagcaaagatgtgcccctgaccatcaaggatcccgccgtgggattcctggaaacaatcagccctggctactccatccacacctacctgtggcgtagacagaagtttgaaagacagtagtaactcgaggacggggtgaactacgcctgaggatccgatctttttccctctgccaaaaattatggggacatcatgaagccccttgagcatctgacttctggctaataaaggaaatttattttcattgcaatagtgtgttggaattttttgtgtctctcactcggcctaggtagataagtagcatggcgggttaatcattaactacaaggaacccctagtgatggagttggccactccctctctgcgcgctcgctcgctcactgaggccgggcgaccaaaggtcgcccgacgcccgggctttgcccgggcggcctcagtgagcgagcgagcgcgcag

SEQ ID NO: 1761 - DNA, 3476 bp, synthetic construct
  misc_feature 1..3476: note = source = /note="Description of Artificial Sequence: Synthetic polynucleotide"
  source 1..3476: mol_type = other DNA
ctgcgcgctcgctcgctcactgaggccgcccgggcaaagcccgggcgtcgggcgacctttggtcgcccggcctcagtgagcgagcgagcgcgcagagagggagtggccaactccatcactaggggttccttgtagttaatgattaacccgccatgctacttatctaccagggtaatggggatcctctagaactatagctagtcgacattgattattgactagttattaatagtaatcaattacggggtcattagttcatagcccatatatggagttccgcgttacataacttacggtaaatggcccgcctggctgaccgcccaacgacccccgcccattgacgtcaataatgacgtatgttcccatagtaacgccaatagggactttccattgacgtcaatgggtggagtatttacggtaaactgcccacttggcagtacatcaagtgtatcatatgccaagtacgccccctattgacgtcaatgacggtaaatggcccgcctggcattatgcccagtacatgaccttatgggactttcctacttggcagtacatctacgtattagtcatcgctattaccatgtcgaggccacgttctgcttcactctccccatctcccccccctccccacccccaattttgtatttatttattttttaattattttgtgcagcgatgggggcggggggggggggcgcgcgccaggcggggcggggcggggcgaggggcggggcggggcgaggcggagaggtgcggcggcagccaatcagagcggcgcgctccgaaagtttccttttatggcgaggcggcggcggcggcggccctataaaaagcgaagcgcgcggcgggcgggagcaagcttcgtttagtgaaccgtcagatcgcctggagacgccatccacgctgttttgacctccatagaagacaccgggaccgatccagcctccgcggattcgaatcccggccgggaacggtgcattggaacgcggattccccgtgccaagagtgacgtaagtaccgcctatagagtctataggcccacaaaaaatgctttcttcttttaatatacttttttgtttatcttatttctaatactttccctaatctctttctttcagggcaataatgatacaatgtatcatgcctctttgcaccattctaaagaataacagtgataatttctgggttaaggcaatagcaatatttctgcatataaatatttctgcatataaattgtaactgatgtaagaggtttcatattgctaatagcagctacaatccagctaccattctgcttttattttatggttgggataaggctggattattctgagtccaagctaggcccttttgctaatcatgttcatacctcttatcttcctcccacagctcctgggcaacgtgctggtctgtgtgctggcccatcactttggcaaagaattgggattcgaaccggtgccgccaccatggaattcagcagccccagcagagaggaatgccccaagcctctgagccgggtgtcaatcatggccggatctctgacaggactgctgctgcttcaggccgtgtcttgggcttctggcatgaaggagaccgctgctgcaaagttcgagagacagcatatggatagctccacaagcgccgcagctagaccttgcatccccaagagcttcggctacagcagcgtcgtgtgcgtgtgcaatgccacctactgcgacagcttcgaccctcctacctttcctgctctgggcaccttcagcagatacgagagcaccagatccggcagacggatggaactgagcatgggacccatccaggccaatcacacaggcactggcctgctgctgacactgcagcctgagcagaaattccagaaagtgaaaggcttcggcggagccatgacagatgccgccgctctgaatatcctggctctgtctccaccagctcagaacctgctgctcaagagctacttcagcgaggaaggcatcggctacaacatcatcagagtgcccatggccagctgcgacttcagcatcaggacctacacctacgccgacacacccgacgatttccagctgcacaacttcagcctgcctgaagaggacaccaagctgaagatccctctgatccacagagccctgcagctggcacaaagacccgtgtcactgctggcctctccatggacatctcccacctggctgaaaacaaatggcgccgtgaatggcaagggcagcctgaaaggccaacctggcgacatctaccaccagacctgggccagatacttcgtgaagttcctggacgcctatgccgagcacaagctgcagttttgggccgtgacagccgagaacgaaccttctgctggactgctgagcggctacccctttcagtgcctgggctttacacccgagcaccagcgggactttatcgcccgtgatctgggacccacactggccaatagcacccaccataatgtgcggctgctgatgctggacgaccagagactgcttctgccccactgggctaaagtggtgctgacagatcctgaggccgccaaatacgtgcacggaatcgccgtgcactggtatctggactttctggcccctgccaaggccacactgggagagacacacagactgttccccaacaccatgctgttcgccagcgaagcctgtgtgggcagcaagttttgggaacagagcgtgcggctcggcagctgggatagaggcatgcagtacagccacagcatcatcaccaacctgctgtaccacgtcgtcggctggaccgactggaatctggccctgaatcctgaaggcggccctaactgggtccgaaacttcgtggacagccccatcatcgtggacatcaccaaggacaccttctacaagcagcccatgttctaccacctgggacacttcagcaagttcatccccgagggctctcagcgcgttggactggtggcttcccagaagaacgatctggacgccgtggctctgatgcaccctgatggatctgctgtggtggtggtcctgaaccgcagcagcaaagatgtgcccctgaccatcaaggatcccgccgtgggattcctggaaacaatcagccctggctactccatccacacctacctgtggcgtagacagtagtaactcgaggacggggtgaactacgcctgaggatccgatctttttccctctgccaaaaattatggggacatcatgaagccccttgagcatctgacttctggctaataaaggaaatttattttcattgcaatagtgtgttggaattttttgtgtctctcactcggcctaggtagataagtagcatggcgggttaatcattaactacaaggaacccctagtgatggagttggccactccctctctgcgcgctcgctcgctcactgaggccgggcgaccaaaggtcgcccgacgcccgggctttgcccgggcggcctcagtgagcgagcgagcgcgcag

SEQ ID NO: 1762 - DNA, 3428 bp, synthetic construct
  misc_feature 1..3428: note = source = /note="Description of Artificial Sequence: Synthetic polynucleotide"
  source 1..3428: mol_type = other DNA
ctgcgcgctcgctcgctcactgaggccgcccgggcaaagcccgggcgtcgggcgacctttggtcgcccggcctcagtgagcgagcgagcgcgcagagagggagtggccaactccatcactaggggttccttgtagttaatgattaacccgccatgctacttatctaccagggtaatggggatcctctagaactatagctagtcgacattgattattgactagttattaatagtaatcaattacggggtcattagttcatagcccatatatggagttccgcgttacataacttacggtaaatggcccgcctggctgaccgcccaacgacccccgcccattgacgtcaataatgacgtatgttcccatagtaacgccaatagggactttccattgacgtcaatgggtggagtatttacggtaaactgcccacttggcagtacatcaagtgtatcatatgccaagtacgccccctattgacgtcaatgacggtaaatggcccgcctggcattatgcccagtacatgaccttatgggactttcctacttggcagtacatctacgtattagtcatcgctattaccatgtcgaggccacgttctgcttcactctccccatctcccccccctccccacccccaattttgtatttatttattttttaattattttgtgcagcgatgggggcggggggggggggcgcgcgccaggcggggcggggcggggcgaggggcggggcggggcgaggcggagaggtgcggcggcagccaatcagagcggcgcgctccgaaagtttccttttatggcgaggcggcggcggcggcggccctataaaaagcgaagcgcgcggcgggcgggagcaagcttcgtttagtgaaccgtcagatcgcctggagacgccatccacgctgttttgacctccatagaagacaccgggaccgatccagcctccgcggattcgaatcccggccgggaacggtgcattggaacgcggattccccgtgccaagagtgacgtaagtaccgcctatagagtctataggcccacaaaaaatgctttcttcttttaatatacttttttgtttatcttatttctaatactttccctaatctctttctttcagggcaataatgatacaatgtatcatgcctctttgcaccattctaaagaataacagtgataatttctgggttaaggcaatagcaatatttctgcatataaatatttctgcatataaattgtaactgatgtaagaggtttcatattgctaatagcagctacaatccagctaccattctgcttttattttatggttgggataaggctggattattctgagtccaagctaggcccttttgctaatcatgttcatacctcttatcttcctcccacagctcctgggcaacgtgctggtctgtgtgctggcccatcactttggcaaagaattgggattcgaaccggtgccgccaccatggaattcagcagccccagcagagaggaatgccccaagcctctgagccgggtgtcaatcatggccggatctctgacaggactgctgctgcttcaggccgtgtcttgggcttctggcgctagaccttgcatccccaagagcttcggctacagcagcgtcgtgtgcgtgtgcaatgccacctactgcgacagcttcgaccctcctacctttcctgctctgggcaccttcagcagatacgagagcaccagatccggcagacggatggaactgagcatgggacccatccaggccaatcacacaggcactggcctgctgctgacactgcagcctgagcagaaattccagaaagtgaaaggcttcggcggagccatgacagatgccgccgctctgaatatcctggctctgtctccaccagctcagaacctgctgctcaagagctacttcagcgaggaaggcatcggctacaacatcatcagagtgcccatggccagctgcgacttcagcatcaggacctacacctacgccgacacacccgacgatttccagctgcacaacttcagcctgcctgaagaggacaccaagctgaagatccctctgatccacagagccctgcagctggcacaaagacccgtgtcactgctggcctctccatggacatctcccacctggctgaaaacaaatggcgccgtgaatggcaagggcagcctgaaaggccaacctggcgacatctaccaccagacctgggccagatacttcgtgaagttcctggacgcctatgccgagcacaagctgcagttttgggccgtgacagccgagaacgaaccttctgctggactgctgagcggctacccctttcagtgcctgggctttacacccgagcaccagcgggactttatcgcccgtgatctgggacccacactggccaatagcacccaccataatgtgcggctgctgatgctggacgaccagagactgcttctgccccactgggctaaagtggtgctgacagatcctgaggccgccaaatacgtgcacggaatcgccgtgcactggtatctggactttctggcccctgccaaggccacactgggagagacacacagactgttccccaacaccatgctgttcgccagcgaagcctgtgtgggcagcaagttttgggaacagagcgtgcggctcggcagctgggatagaggcatgcagtacagccacagcatcatcaccaacctgctgtaccacgtcgtcggctggaccgactggaatctggccctgaatcctgaaggcggccctaactgggtccgaaacttcgtggacagccccatcatcgtggacatcaccaaggacaccttctacaagcagcccatgttctaccacctgggacacttcagcaagttcatccccgagggctctcagcgcgttggactggtggcttcccagaagaacgatctggacgccgtggctctgatgcaccctgatggatctgctgtggtggtggtcctgaaccgcagcagcaaagatgtgcccctgaccatcaaggatcccgccgtgggattcctggaaacaatcagccctggctactccatccacacctacctgtggcgtagacagcagaaaatcctggattagtaactcgaggacggggtgaactacgcctgaggatccgatctttttccctctgccaaaaattatggggacatcatgaagccccttgagcatctgacttctggctaataaaggaaatttattttcattgcaatagtgtgttggaattttttgtgtctctcactcggcctaggtagataagtagcatggcgggttaatcattaactacaaggaacccctagtgatggagttggccactccctctctgcgcgctcgctcgctcactgaggccgggcgaccaaaggtcgcccgacgcccgggctttgcccgggcggcctcagtgagcgagcgagcgcgcag

SEQ ID NO: 1763 - DNA, 3428 bp, synthetic construct
  misc_feature 1..3428: note = source = /note="Description of Artificial Sequence: Synthetic polynucleotide"
  source 1..3428: mol_type = other DNA
ctgcgcgctcgctcgctcactgaggccgcccgggcaaagcccgggcgtcgggcgacctttggtcgcccggcctcagtgagcgagcgagcgcgcagagagggagtggccaactccatcactaggggttccttgtagttaatgattaacccgccatgctacttatctaccagggtaatggggatcctctagaactatagctagtcgacattgattattgactagttattaatagtaatcaattacggggtcattagttcatagcccatatatggagttccgcgttacataacttacggtaaatggcccgcctggctgaccgcccaacgacccccgcccattgacgtcaataatgacgtatgttcccatagtaacgccaatagggactttccattgacgtcaatgggtggagtatttacggtaaactgcccacttggcagtacatcaagtgtatcatatgccaagtacgccccctattgacgtcaatgacggtaaatggcccgcctggcattatgcccagtacatgaccttatgggactttcctacttggcagtacatctacgtattagtcatcgctattaccatgtcgaggccacgttctgcttcactctccccatctcccccccctccccacccccaattttgtatttatttattttttaattattttgtgcagcgatgggggcggggggggggggcgcgcgccaggcggggcggggcggggcgaggggcggggcggggcgaggcggagaggtgcggcggcagccaatcagagcggcgcgctccgaaagtttccttttatggcgaggcggcggcggcggcggccctataaaaagcgaagcgcgcggcgggcgggagcaagcttcgtttagtgaaccgtcagatcgcctggagacgccatccacgctgttttgacctccatagaagacaccgggaccgatccagcctccgcggattcgaatcccggccgggaacggtgcattggaacgcggattccccgtgccaagagtgacgtaagtaccgcctatagagtctataggcccacaaaaaatgctttcttcttttaatatacttttttgtttatcttatttctaatactttccctaatctctttctttcagggcaataatgatacaatgtatcatgcctctttgcaccattctaaagaataacagtgataatttctgggttaaggcaatagcaatatttctgcatataaatatttctgcatataaattgtaactgatgtaagaggtttcatattgctaatagcagctacaatccagctaccattctgcttttattttatggttgggataaggctggattattctgagtccaagctaggcccttttgctaatcatgttcatacctcttatcttcctcccacagctcctgggcaacgtgctggtctgtgtgctggcccatcactttggcaaagaattgggattcgaaccggtgccgccaccatggaattcagcagccccagcagagaggaatgccccaagcctctgagccgggtgtcaatcatggccggatctctgacaggactgctgctgcttcaggccgtgtcttgggcttctggcgctagaccttgcatccccaagagcttcggctacagcagcgtcgtgtgcgtgtgcaatgccacctactgcgacagcttcgaccctcctacctttcctgctctgggcaccttcagcagatacgagagcaccagatccggcagacggatggaactgagcatgggacccatccaggccaatcacacaggcactggcctgctgctgacactgcagcctgagcagaaattccagaaagtgaaaggcttcggcggagccatgacagatgccgccgctctgaatatcctggctctgtctccaccagctcagaacctgctgctcaagagctacttcagcgaggaaggcatcggctacaacatcatcagagtgcccatggccagctgcgacttcagcatcaggacctacacctacgccgacacacccgacgatttccagctgcacaacttcagcctgcctgaagaggacaccaagctgaagatccctctgatccacagagccctgcagctggcacaaagacccgtgtcactgctggcctctccatggacatctcccacctggctgaaaacaaatggcgccgtgaatggcaagggcagcctgaaaggccaacctggcgacatctaccaccagacctgggccagatacttcgtgaagttcctggacgcctatgccgagcacaagctgcagttttgggccgtgacagccgagaacgaaccttctgctggactgctgagcggctacccctttcagtgcctgggctttacacccgagcaccagcgggactttatcgcccgtgatctgggacccacactggccaatagcacccaccataatgtgcggctgctgatgctggacgaccagagactgcttctgccccactgggctaaagtggtgctgacagatcctgaggccgccaaatacgtgcacggaatcgccgtgcactggtatctggactttctggcccctgccaaggccacactgggagagacacacagactgttccccaacaccatgctgttcgccagcgaagcctgtgtgggcagcaagttttgggaacagagcgtgcggctcggcagctgggatagaggcatgcagtacagccacagcatcatcaccaacctgctgtaccacgtcgtcggctggaccgactggaatctggccctgaatcctgaaggcggccctaactgggtccgaaacttcgtggacagccccatcatcgtggacatcaccaaggacaccttctacaagcagcccatgttctaccacctgggacacttcagcaagttcatccccgagggctctcagcgcgttggactggtggcttcccagaagaacgatctggacgccgtggctctgatgcaccctgatggatctgctgtggtggtggtcctgaaccgcagcagcaaagatgtgcccctgaccatcaaggatcccgccgtgggattcctggaaacaatcagccctggctactccatccacacctacctgtggcgtagacagcagagattcttcgagtagtaactcgaggacggggtgaactacgcctgaggatccgatctttttccctctgccaaaaattatggggacatcatgaagccccttgagcatctgacttctggctaataaaggaaatttattttcattgcaatagtgtgttggaattttttgtgtctctcactcggcctaggtagataagtagcatggcgggttaatcattaactacaaggaacccctagtgatggagttggccactccctctctgcgcgctcgctcgctcactgaggccgggcgaccaaaggtcgcccgacgcccgggctttgcccgggcggcctcagtgagcgagcgagcgcgcag

SEQ ID NO: 1764 - DNA, 3512 bp, synthetic construct
  misc_feature 1..3512: note = source = /note="Description of Artificial Sequence: Synthetic polynucleotide"
  source 1..3512: mol_type = other DNA
ctgcgcgctcgctcgctcactgaggccgcccgggcaaagcccgggcgtcgggcgacctttggtcgcccggcctcagtgagcgagcgagcgcgcagagagggagtggccaactccatcactaggggttccttgtagttaatgattaacccgccatgctacttatctaccagggtaatggggatcctctagaactatagctagtcgacattgattattgactagttattaatagtaatcaattacggggtcattagttcatagcccatatatggagttccgcgttacataacttacggtaaatggcccgcctggctgaccgcccaacgacccccgcccattgacgtcaataatgacgtatgttcccatagtaacgccaatagggactttccattgacgtcaatgggtggagtatttacggtaaactgcccacttggcagtacatcaagtgtatcatatgccaagtacgccccctattgacgtcaatgacggtaaatggcccgcctggcattatgcccagtacatgaccttatgggactttcctacttggcagtacatctacgtattagtcatcgctattaccatgtcgaggccacgttctgcttcactctccccatctcccccccctccccacccccaattttgtatttatttattttttaattattttgtgcagcgatgggggcggggggggggggcgcgcgccaggcggggcggggcggggcgaggggcggggcggggcgaggcggagaggtgcggcggcagccaatcagagcggcgcgctccgaaagtttccttttatggcgaggcggcggcggcggcggccctataaaaagcgaagcgcgcggcgggcgggagcaagcttcgtttagtgaaccgtcagatcgcctggagacgccatccacgctgttttgacctccatagaagacaccgggaccgatccagcctccgcggattcgaatcccggccgggaacggtgcattggaacgcggattccccgtgccaagagtgacgtaagtaccgcctatagagtctataggcccacaaaaaatgctttcttcttttaatatacttttttgtttatcttatttctaatactttccctaatctctttctttcagggcaataatgatacaatgtatcatgcctctttgcaccattctaaagaataacagtgataatttctgggttaaggcaatagcaatatttctgcatataaatatttctgcatataaattgtaactgatgtaagaggtttcatattgctaatagcagctacaatccagctaccattctgcttttattttatggttgggataaggctggattattctgagtccaagctaggcccttttgctaatcatgttcatacctcttatcttcctcccacagctcctgggcaacgtgctggtctgtgtgctggcccatcactttggcaaagaattgggattcgaaccggtgccgccaccatggaattcagcagccccagcagagaggaatgccccaagcctctgagccgggtgtcaatcatggccggatctctgacaggactgctgctgcttcaggccgtgtcttgggcttctggcgctagaccttgcatccccaagagcttcggctacagcagcgtcgtgtgcgtgtgcaatgccacctactgcgacagcttcgaccctcctacctttcctgctctgggcaccttcagcagatacgagagcaccagatccggcagacggatggaactgagcatgggacccatccaggccaatcacacaggcactggcctgctgctgacactgcagcctgagcagaaattccagaaagtgaaaggcttcggcggagccatgacagatgccgccgctctgaatatcctggctctgtctccaccagctcagaacctgctgctcaagagctacttcagcgaggaaggcatcggctacaacatcatcagagtgcccatggccagctgcgacttcagcatcaggacctacacctacgccgacacacccgacgatttccagctgcacaacttcagcctgcctgaagaggacaccaagctgaagatccctctgatccacagagccctgcagctggcacaaagacccgtgtcactgctggcctctccatggacatctcccacctggctgaaaacaaatggcgccgtgaatggcaagggcagcctgaaaggccaacctggcgacatctaccaccagacctgggccagatacttcgtgaagttcctggacgcctatgccgagcacaagctgcagttttgggccgtgacagccgagaacgaaccttctgctggactgctgagcggctacccctttcagtgcctgggctttacacccgagcaccagcgggactttatcgcccgtgatctgggacccacactggccaatagcacccaccataatgtgcggctgctgatgctggacgaccagagactgcttctgccccactgggctaaagtggtgctgacagatcctgaggccgccaaatacgtgcacggaatcgccgtgcactggtatctggactttctggcccctgccaaggccacactgggagagacacacagactgttccccaacaccatgctgttcgccagcgaagcctgtgtgggcagcaagttttgggaacagagcgtgcggctcggcagctgggatagaggcatgcagtacagccacagcatcatcaccaacctgctgtaccacgtcgtcggctggaccgactggaatctggccctgaatcctgaaggcggccctaactgggtccgaaacttcgtggacagccccatcatcgtggacatcaccaaggacaccttctacaagcagcccatgttctaccacctgggacacttcagcaagttcatccccgagggctctcagcgcgttggactggtggcttcccagaagaacgatctggacgccgtggctctgatgcaccctgatggatctgctgtggtggtggtcctgaaccgcagcagcaaagatgtgcccctgaccatcaaggatcccgccgtgggattcctggaaacaatcagccctggctactccatccacacctacctgtggcgtagacagggaggggggggttcgggtggcggcggaagtgggggcggtggttctctacggaagctgcggaagcggctactgctgcggaaacttcggaaacggctactgtagtaactcgaggacggggtgaactacgcctgaggatccgatctttttccctctgccaaaaattatggggacatcatgaagccccttgagcatctgacttctggctaataaaggaaatttattttcattgcaatagtgtgttggaattttttgtgtctctcactcggcctaggtagataagtagcatggcgggttaatcattaactacaaggaacccctagtgatggagttggccactccctctctgcgcgctcgctcgctcactgaggccgggcgaccaaaggtcgcccgacgcccgggctttgcccgggcggcctcagtgagcgagcgagcgcgcag

SEQ ID NO: 1765 - DNA, 3500 bp, synthetic construct
  misc_feature 1..3500: note = source = /note="Description of Artificial Sequence: Synthetic polynucleotide"
  source 1..3500: mol_type = other DNA
ctgcgcgctcgctcgctcactgaggccgcccgggcaaagcccgggcgtcgggcgacctttggtcgcccggcctcagtgagcgagcgagcgcgcagagagggagtggccaactccatcactaggggttccttgtagttaatgattaacccgccatgctacttatctaccagggtaatggggatcctctagaactatagctagtcgacattgattattgactagttattaatagtaatcaattacggggtcattagttcatagcccatatatggagttccgcgttacataacttacggtaaatggcccgcctggctgaccgcccaacgacccccgcccattgacgtcaataatgacgtatgttcccatagtaacgccaatagggactttccattgacgtcaatgggtggagtatttacggtaaactgcccacttggcagtacatcaagtgtatcatatgccaagtacgccccctattgacgtcaatgacggtaaatggcccgcctggcattatgcccagtacatgaccttatgggactttcctacttggcagtacatctacgtattagtcatcgctattaccatgtcgaggccacgttctgcttcactctccccatctcccccccctccccacccccaattttgtatttatttattttttaattattttgtgcagcgatgggggcggggggggggggcgcgcgccaggcggggcggggcggggcgaggggcggggcggggcgaggcggagaggtgcggcggcagccaatcagagcggcgcgctccgaaagtttccttttatggcgaggcggcggcggcggcggccctataaaaagcgaagcgcgcggcgggcgggagcaagcttcgtttagtgaaccgtcagatcgcctggagacgccatccacgctgttttgacctccatagaagacaccgggaccgatccagcctccgcggattcgaatcccggccgggaacggtgcattggaacgcggattccccgtgccaagagtgacgtaagtaccgcctatagagtctataggcccacaaaaaatgctttcttcttttaatatacttttttgtttatcttatttctaatactttccctaatctctttctttcagggcaataatgatacaatgtatcatgcctctttgcaccattctaaagaataacagtgataatttctgggttaaggcaatagcaatatttctgcatataaatatttctgcatataaattgtaactgatgtaagaggtttcatattgctaatagcagctacaatccagctaccattctgcttttattttatggttgggataaggctggattattctgagtccaagctaggcccttttgctaatcatgttcatacctcttatcttcctcccacagctcctgggcaacgtgctggtctgtgtgctggcccatcactttggcaaagaattgggattcgaaccggtgccgccaccatggaattcagcagccccagcagagaggaatgccccaagcctctgagccgggtgtcaatcatggccggatctctgacaggactgctgctgcttcaggccgtgtcttgggcttctggcgctagaccttgcatccccaagagcttcggctacagcagcgtcgtgtgcgtgtgcaatgccacctactgcgacagcttcgaccctcctacctttcctgctctgggcaccttcagcagatacgagagcaccagatccggcagacggatggaactgagcatgggacccatccaggccaatcacacaggcactggcctgctgctgacactgcagcctgagcagaaattccagaaagtgaaaggcttcggcggagccatgacagatgccgccgctctgaatatcctggctctgtctccaccagctcagaacctgctgctcaagagctacttcagcgaggaaggcatcggctacaacatcatcagagtgcccatggccagctgcgacttcagcatcaggacctacacctacgccgacacacccgacgatttccagctgcacaacttcagcctgcctgaagaggacaccaagctgaagatccctctgatccacagagccctgcagctggcacaaagacccgtgtcactgctggcctctccatggacatctcccacctggctgaaaacaaatggcgccgtgaatggcaagggcagcctgaaaggccaacctggcgacatctaccaccagacctgggccagatacttcgtgaagttcctggacgcctatgccgagcacaagctgcagttttgggccgtgacagccgagaacgaaccttctgctggactgctgagcggctacccctttcagtgcctgggctttacacccgagcaccagcgggactttatcgcccgtgatctgggacccacactggccaatagcacccaccataatgtgcggctgctgatgctggacgaccagagactgcttctgccccactgggctaaagtggtgctgacagatcctgaggccgccaaatacgtgcacggaatcgccgtgcactggtatctggactttctggcccctgccaaggccacactgggagagacacacagactgttccccaacaccatgctgttcgccagcgaagcctgtgtgggcagcaagttttgggaacagagcgtgcggctcggcagctgggatagaggcatgcagtacagccacagcatcatcaccaacctgctgtaccacgtcgtcggctggaccgactggaatctggccctgaatcctgaaggcggccctaactgggtccgaaacttcgtggacagccccatcatcgtggacatcaccaaggacaccttctacaagcagcccatgttctaccacctgggacacttcagcaagttcatccccgagggctctcagcgcgttggactggtggcttcccagaagaacgatctggacgccgtggctctgatgcaccctgatggatctgctgtggtggtggtcctgaaccgcagcagcaaagatgtgcccctgaccatcaaggatcccgccgtgggattcctggaaacaatcagccctggctactccatccacacctacctgtggcgtagacagggaggggggggttcgggtggcggcggaagtgggggcggtggttcttatggcaggaaaaagcggaggcaaaggcgccgccccccccagtagtaactcgaggacggggtgaactacgcctgaggatccgatctttttccctctgccaaaaattatggggacatcatgaagccccttgagcatctgacttctggctaataaaggaaatttattttcattgcaatagtgtgttggaattttttgtgtctctcactcggcctaggtagataagtagcatggcgggttaatcattaactacaaggaacccctagtgatggagttggccactccctctctgcgcgctcgctcgctcactgaggccgggcgaccaaaggtcgcccgacgcccgggctttgcccgggcggcctcagtgagcgagcgagcgcgcag

SEQ ID NO: 1766 - DNA, 4463 bp, synthetic construct
  misc_feature 1..4463: note = source = /note="Description of Artificial Sequence: Synthetic polynucleotide"
  source 1..4463: mol_type = other DNA
ctgcgcgctcgctcgctcactgaggccgcccgggcaaagcccgggcgtcgggcgacctttggtcgcccggcctcagtgagcgagcgagcgcgcagagagggagtggccaactccatcactaggggttccttgtagttaatgattaacccgccatgctacttatctaccagggtaatggggatcctctagaactatagctagtcgacattgattattgactagttattaatagtaatcaattacggggtcattagttcatagcccatatatggagttccgcgttacataacttacggtaaatggcccgcctggctgaccgcccaacgacccccgcccattgacgtcaataatgacgtatgttcccatagtaacgccaatagggactttccattgacgtcaatgggtggagtatttacggtaaactgcccacttggcagtacatcaagtgtatcatatgccaagtacgccccctattgacgtcaatgacggtaaatggcccgcctggcattatgcccagtacatgaccttatgggactttcctacttggcagtacatctacgtattagtcatcgctattaccatgtcgaggccacgttctgcttcactctccccatctcccccccctccccacccccaattttgtatttatttattttttaattattttgtgcagcgatgggggcggggggggggggcgcgcgccaggcggggcggggcggggcgaggggcggggcggggcgaggcggagaggtgcggcggcagccaatcagagcggcgcgctccgaaagtttccttttatggcgaggcggcggcggcggcggccctataaaaagcgaagcgcgcggcgggcgggagcaagctccggtgccgccaccatggaattcagcagccccagcagagaggaatgccccaagcctctgagccgggtgtcaatcatggccggatctctgacaggactgctgctgcttcaggccgtgtcttgggcttctggcgctagaccttgcatccccaagagcttcggctacagcagcgtcgtgtgcgtgtgcaatgccacctactgcgacagcttcgaccctcctacctttcctgctctgggcaccttcagcagatacgagagcaccagatccggcagacggatggaactgagcatgggacccatccaggccaatcacacaggcactggcctgctgctgacactgcagcctgagcagaaattccagaaagtgaaaggcttcggcggagccatgacagatgccgccgctctgaatatcctggctctgtctccaccagctcagaacctgctgctcaagagctacttcagcgaggaaggcatcggctacaacatcatcagagtgcccatggccagctgcgacttcagcatcaggacctacacctacgccgacacacccgacgatttccagctgcacaacttcagcctgcctgaagaggacaccaagctgaagatccctctgatccacagagccctgcagctggcacaaagacccgtgtcactgctggcctctccatggacatctcccacctggctgaaaacaaatggcgccgtgaatggcaagggcagcctgaaaggccaacctggcgacatctaccaccagacctgggccagatacttcgtgaagttcctggacgcctatgccgagcacaagctgcagttttgggccgtgacagccgagaacgaaccttctgctggactgctgagcggctacccctttcagtgcctgggctttacacccgagcaccagcgggactttatcgcccgtgatctgggacccacactggccaatagcacccaccataatgtgcggctgctgatgctggacgaccagagactgcttctgccccactgggctaaagtggtgctgacagatcctgaggccgccaaatacgtgcacggaatcgccgtgcactggtatctggactttctggcccctgccaaggccacactgggagagacacacagactgttccccaacaccatgctgttcgccagcgaagcctgtgtgggcagcaagttttgggaacagagcgtgcggctcggcagctgggatagaggcatgcagtacagccacagcatcatcaccaacctgctgtaccacgtcgtcggctggaccgactggaatctggccctgaatcctgaaggcggccctaactgggtccgaaacttcgtggacagccccatcatcgtggacatcaccaaggacaccttctacaagcagcccatgttctaccacctgggacacttcagcaagttcatccccgagggctctcagcgcgttggactggtggcttcccagaagaacgatctggacgccgtggctctgatgcaccctgatggatctgctgtggtggtggtcctgaaccgcagcagcaaagatgtgcccctgaccatcaaggatcccgccgtgggattcctggaaacaatcagccctggctactccatccacacctacctgtggcgtagacagagaaagaggcgagagggcagaggaagtcttctaacatgcggtgacgtggaggagaatcccggccctatgtacgccctcttcctcctggccagcctcctgggcgcggctctagccggcccggtccttggactgaaagaatgcaccaggggctcggcagtgtggtgccagaatgtgaagacggcgtccgactgcggggcagtgaagcactgcctgcagaccgtttggaacaagccaacagtgaaatcccttccctgcgacatatgcaaagacgttgtcaccgcagctggtgatatgctgaaggacaatgccactgaggaggagatccttgtttacttggagaagacctgtgactggcttccgaaaccgaacatgtctgcttcatgcaaggagatagtggactcctacctccctgtcatcctggacatcattaaaggagaaatgagccgtcctggggaggtgtgctctgctctcaacctctgcgagtctctccagaagcacctagcagagctgaatcaccagaagcagctggagtccaataagatcccagagctggacatgactgaggtggtggcccccttcatggccaacatccctctcctcctctaccctcaggacggcccccgcagcaagccccagccaaaggataatggggacgtttgccaggactgcattcagatggtgactgacatccagactgctgtacggaccaactccacctttgtccaggccttggtggaacatgtcaaggaggagtgtgaccgcctgggccctggcatggccgacatatgcaagaactatatcagccagtattctgaaattgctatccagatgatgatgcacatgcaacccaaggagatctgtgcgctggttgggttctgtgatgaggtgaaagagatgcccatgcagactctggtccccgccaaagtggcctccaagaatgtcatccctgccctggaactggtggagcccattaagaagcacgaggtcccagcaaagtctgatgtttactgtgaggtgtgtgaattcctggtgaaggaggtgaccaagctgattgacaacaacaagactgagaaagaaatactcgacgcttttgacaaaatgtgctcgaagctgccgaagtccctgtcggaagagtgccaggaggtggtggacacgtacggcagctccatcctgtccatcctgctggaggaggtcagccctgagctggtgtgcagcatgctgcacctctgctctggcacgcggctgcctgcactgaccgttcacgtgactcagccaaaggacggtggcttctgcgaagtgtgcaagaagctggtgggttatttggatcgcaacctggagaaaaacagcaccaagcaggagatcctggctgctcttgagaaaggctgcagcttcctgccagacccttaccagaagcagtgtgatcagtttgtggcagagtacgagcccgtgctgatcgagatcctggtggaggtgatggatccttccttcgtgtgcttgaaaattggagcctgcccctcggcccataagcccttgttgggaactgagaagtgtatatggggcccaagctactggtgccagaacacagagacagcagcccagtgcaatgctgtcgagcattgcaaacgccatgtgtggaactagtagtaactcgaggacggggtgaactacgcctgaggatccgatctttttccctctgccaaaaattatggggacatcatgaagccccttgagcatctgacttctggctaataaaggaaatttattttcattgcaatagtgtgttggaattttttgtgtctctcactcggcctaggtagataagtagcatggcgggttaatcattaactacaaggaacccctagtgatggagttggccactccctctctgcgcgctcgctcgctcactgaggccgggcgaccaaaggtcgcccgacgcccgggctttgcccgggcggcctcagtgagcgagcgagcgcgcag

SEQ ID NO: 1767 - DNA, 3878 bp, synthetic construct
  misc_feature 1..3878: note = source = /note="Description of Artificial Sequence: Synthetic polynucleotide"
  source 1..3878: mol_type = other DNA
ctgcgcgctcgctcgctcactgaggccgcccgggcaaagcccgggcgtcgggcgacctttggtcgcccggcctcagtgagcgagcgagcgcgcagagagggagtggccaactccatcactaggggttccttgtagttaatgattaacccgccatgctacttatctaccagggtaatggggatcctctagaactatagctagtcgacattgattattgactagttattaatagtaatcaattacggggtcattagttcatagcccatatatggagttccgcgttacataacttacggtaaatggcccgcctggctgaccgcccaacgacccccgcccattgacgtcaataatgacgtatgttcccatagtaacgccaatagggactttccattgacgtcaatgggtggagtatttacggtaaactgcccacttggcagtacatcaagtgtatcatatgccaagtacgccccctattgacgtcaatgacggtaaatggcccgcctggcattatgcccagtacatgaccttatgggactttcctacttggcagtacatctacgtattagtcatcgctattaccatgtcgaggccacgttctgcttcactctccccatctcccccccctccccacccccaattttgtatttatttattttttaattattttgtgcagcgatgggggcggggggggggggcgcgcgccaggcggggcggggcggggcgaggggcggggcggggcgaggcggagaggtgcggcggcagccaatcagagcggcgcgctccgaaagtttccttttatggcgaggcggcggcggcggcggccctataaaaagcgaagcgcgcggcgggcgggagcaagcttcgtttagtgaaccgtcagatcgcctggagacgccatccacgctgttttgacctccatagaagacaccgggaccgatccagcctccgcggattcgaatcccggccgggaacggtgcattggaacgcggattccccgtgccaagagtgacgtaagtaccgcctatagagtctataggcccacaaaaaatgctttcttcttttaatatacttttttgtttatcttatttctaatactttccctaatctctttctttcagggcaataatgatacaatgtatcatgcctctttgcaccattctaaagaataacagtgataatttctgggttaaggcaatagcaatatttctgcatataaatatttctgcatataaattgtaactgatgtaagaggtttcatattgctaatagcagctacaatccagctaccattctgcttttattttatggttgggataaggctggattattctgagtccaagctaggcccttttgctaatcatgttcatacctcttatcttcctcccacagctcctgggcaacgtgctggtctgtgtgctggcccatcactttggcaaagaattgggattcgaaccggtgccgccaccatggaattcagcagccccagcagagaggaatgccccaagcctctgagccgggtgtcaatcatggccggatctctgacaggactgctgctgcttcaggccgtgtcttgggcttctggcgctagaccttgcatccccaagagcttcggctacagcagcgtcgtgtgcgtgtgcaatgccacctactgcgacagcttcgaccctcctacctttcctgctctgggcaccttcagcagatacgagagcaccagatccggcagacggatggaactgagcatgggacccatccaggccaatcacacaggcactggcctgctgctgacactgcagcctgagcagaaattccagaaagtgaaaggcttcggcggagccatgacagatgccgccgctctgaatatcctggctctgtctccaccagctcagaacctgctgctcaagagctacttcagcgaggaaggcatcggctacaacatcatcagagtgcccatggccagctgcgacttcagcatcaggacctacacctacgccgacacacccgacgatttccagctgcacaacttcagcctgcctgaagaggacaccaagctgaagatccctctgatccacagagccctgcagctggcacaaagacccgtgtcactgctggcctctccatggacatctcccacctggctgaaaacaaatggcgccgtgaatggcaagggcagcctgaaaggccaacctggcgacatctaccaccagacctgggccagatacttcgtgaagttcctggacgcctatgccgagcacaagctgcagttttgggccgtgacagccgagaacgaaccttctgctggactgctgagcggctacccctttcagtgcctgggctttacacccgagcaccagcgggactttatcgcccgtgatctgggacccacactggccaatagcacccaccataatgtgcggctgctgatgctggacgaccagagactgcttctgccccactgggctaaagtggtgctgacagatcctgaggccgccaaatacgtgcacggaatcgccgtgcactggtatctggactttctggcccctgccaaggccacactgggagagacacacagactgttccccaacaccatgctgttcgccagcgaagcctgtgtgggcagcaagttttgggaacagagcgtgcggctcggcagctgggatagaggcatgcagtacagccacagcatcatcaccaacctgctgtaccacgtcgtcggctggaccgactggaatctggccctgaatcctgaaggcggccctaactgggtccgaaacttcgtggacagccccatcatcgtggacatcaccaaggacaccttctacaagcagcccatgttctaccacctgggacacttcagcaagttcatccccgagggctctcagcgcgttggactggtggcttcccagaagaacgatctggacgccgtggctctgatgcaccctgatggatctgctgtggtggtggtcctgaaccgcagcagcaaagatgtgcccctgaccatcaaggatcccgccgtgggattcctggaaacaatcagccctggctactccatccacacctacctgtggcgtagacagagaaagaggcgagagggcagaggaagtcttctaacatgcggtgacgtggaggagaatcccggccctatgtacgccctcttcctcctggccagcctcctgggcgcggctctagccgtgaaagagatgcccatgcagactctggtccccgccaaagtggcctccaagaatgtcatccctgccctggaactggtggagcccattaagaagcacgaggtcccagcaaagtctgatgtttactgtgaggtgtgtgaattcctggtgaaggaggtgaccaagctgattgacaacaacaagactgagaaagaaatactcgacgcttttgacaaaatgtgctcgaagctgccgaagtccctgtcggaagagtgccaggaggtggtggacacgtacggcagctccatcctgtccatcctgctggaggaggtcagccctgagctggtgtgcagcatgctgcacctctgctctggctagtaactcgaggacggggtgaactacgcctgaggatccgatctttttccctctgccaaaaattatggggacatcatgaagccccttgagcatctgacttctggctaataaaggaaatttattttcattgcaatagtgtgttggaattttttgtgtctctcactcggcctaggtagataagtagcatggcgggttaatcattaactacaaggaacccctagtgatggagttggccactccctctctgcgcgctcgctcgctcactgaggccgggcgaccaaaggtcgcccgacgcccgggctttgcccgggcggcctcagtgagcgagcgagcgcgcag

SEQ ID NO: 1768 - DNA, 3767 bp, synthetic construct
  misc_feature 1..3767: note = source = /note="Description of Artificial Sequence: Synthetic polynucleotide"
  source 1..3767: mol_type = other DNA
ctgcgcgctcgctcgctcactgaggccgcccgggcaaagcccgggcgtcgggcgacctttggtcgcccggcctcagtgagcgagcgagcgcgcagagagggagtggccaactccatcactaggggttccttgtagttaatgattaacccgccatgctacttatctaccagggtaatggggatcctctagaactatagctagtcgacattgattattgactagttattaatagtaatcaattacggggtcattagttcatagcccatatatggagttccgcgttacataacttacggtaaatggcccgcctggctgaccgcccaacgacccccgcccattgacgtcaataatgacgtatgttcccatagtaacgccaatagggactttccattgacgtcaatgggtggagtatttacggtaaactgcccacttggcagtacatcaagtgtatcatatgccaagtacgccccctattgacgtcaatgacggtaaatggcccgcctggcattatgcccagtacatgaccttatgggactttcctacttggcagtacatctacgtattagtcatcgctattaccatgtcgaggccacgttctgcttcactctccccatctcccccccctccccacccccaattttgtatttatttattttttaattattttgtgcagcgatgggggcggggggggggggcgcgcgccaggcggggcggggcggggcgaggggcggggcggggcgaggcggagaggtgcggcggcagccaatcagagcggcgcgctccgaaagtttccttttatggcgaggcggcggcggcggcggccctataaaaagcgaagcgcgcggcgggcgggagcaagcttcgtttagtgaaccgtcagatcgcctggagacgccatccacgctgttttgacctccatagaagacaccgggaccgatccagcctccgcggattcgaatcccggccgggaacggtgcattggaacgcggattccccgtgccaagagtgacgtaagtaccgcctatagagtctataggcccacaaaaaatgctttcttcttttaatatacttttttgtttatcttatttctaatactttccctaatctctttctttcagggcaataatgatacaatgtatcatgcctctttgcaccattctaaagaataacagtgataatttctgggttaaggcaatagcaatatttctgcatataaatatttctgcatataaattgtaactgatgtaagaggtttcatattgctaatagcagctacaatccagctaccattctgcttttattttatggttgggataaggctggattattctgagtccaagctaggcccttttgctaatcatgttcatacctcttatcttcctcccacagctcctgggcaacgtgctggtctgtgtgctggcccatcactttggcaaagaattgggattcgaaccggtgccgccaccatggaattcagcagccccagcagagaggaatgccccaagcctctgagccgggtgtcaatcatggccggatctctgacaggactgctgctgcttcaggccgtgtcttgggcttctggcgctagaccttgcatccccaagagcttcggctacagcagcgtcgtgtgcgtgtgcaatgccacctactgcgacagcttcgaccctcctacctttcctgctctgggcaccttcagcagatacgagagcaccagatccggcagacggatggaactgagcatgggacccatccaggccaatcacacaggcactggcctgctgctgacactgcagcctgagcagaaattccagaaagtgaaaggcttcggcggagccatgacagatgccgccgctctgaatatcctggctctgtctccaccagctcagaacctgctgctcaagagctacttcagcgaggaaggcatcggctacaacatcatcagagtgcccatggccagctgcgacttcagcatcaggacctacacctacgccgacacacccgacgatttccagctgcacaacttcagcctgcctgaagaggacaccaagctgaagatccctctgatccacagagccctgcagctggcacaaagacccgtgtcactgctggcctctccatggacatctcccacctggctgaaaacaaatggcgccgtgaatggcaagggcagcctgaaaggccaacctggcgacatctaccaccagacctgggccagatacttcgtgaagttcctggacgcctatgccgagcacaagctgcagttttgggccgtgacagccgagaacgaaccttctgctggactgctgagcggctacccctttcagtgcctgggctttacacccgagcaccagcgggactttatcgcccgtgatctgggacccacactggccaatagcacccaccataatgtgcggctgctgatgctggacgaccagagactgcttctgccccactgggctaaagtggtgctgacagatcctgaggccgccaaatacgtgcacggaatcgccgtgcactggtatctggactttctggcccctgccaaggccacactgggagagacacacagactgttccccaacaccatgctgttcgccagcgaagcctgtgtgggcagcaagttttgggaacagagcgtgcggctcggcagctgggatagaggcatgcagtacagccacagcatcatcaccaacctgctgtaccacgtcgtcggctggaccgactggaatctggccctgaatcctgaaggcggccctaactgggtccgaaacttcgtggacagccccatcatcgtggacatcaccaaggacaccttctacaagcagcccatgttctaccacctgggacacttcagcaagttcatccccgagggctctcagcgcgttggactggtggcttcccagaagaacgatctggacgccgtggctctgatgcaccctgatggatctgctgtggtggtggtcctgaaccgcagcagcaaagatgtgcccctgaccatcaaggatcccgccgtgggattcctggaaacaatcagccctggctactccatccacacctacctgtggcgtagacagagaaagaggcgagagggcagaggaagtcttctaacatgcggtgacgtggaggagaatcccggccctatgtacgccctcttcctcctggccagcctcctgggcgcggctctagcctctgatgtttactgtgaggtgtgtgaattcctggtgaaggaggtgaccaagctgattgacaacaacaagactgagaaagaaatactcgacgcttttgacaaaatgtgctcgaagctgccgaagtccctgtcggaagagtgccaggaggtggtggacacgtacggcagctccatcctgtccatcctgctggaggaggtcagccctgagctggtgtgcagcatgctgcacctctgctctggctagtaactcgaggacggggtgaactacgcctgaggatccgatctttttccctctgccaaaaattatggggacatcatgaagccccttgagcatctgacttctggctaataaaggaaatttattttcattgcaatagtgtgttggaattttttgtgtctctcactcggcctaggtagataagtagcatggcgggttaatcattaactacaaggaacccctagtgatggagttggccactccctctctgcgcgctcgctcgctcactgaggccgggcgaccaaaggtcgcccgacgcccgggctttgcccgggcggcctcagtgagcgagcgagcgcgcag

SEQ ID NO: 1769 - DNA, 3560 bp, synthetic construct
  misc_feature 1..3560: note = source = /note="Description of Artificial Sequence: Synthetic polynucleotide"
  source 1..3560: mol_type = other DNA
ctgcgcgctcgctcgctcactgaggccgcccgggcaaagcccgggcgtcgggcgacctttggtcgcccggcctcagtgagcgagcgagcgcgcagagagggagtggccaactccatcactaggggttccttgtagttaatgattaacccgccatgctacttatctaccagggtaatggggatcctctagaactatagctagtcgacattgattattgactagttattaatagtaatcaattacggggtcattagttcatagcccatatatggagttccgcgttacataacttacggtaaatggcccgcctggctgaccgcccaacgacccccgcccattgacgtcaataatgacgtatgttcccatagtaacgccaatagggactttccattgacgtcaatgggtggagtatttacggtaaactgcccacttggcagtacatcaagtgtatcatatgccaagtacgccccctattgacgtcaatgacggtaaatggcccgcctggcattatgcccagtacatgaccttatgggactttcctacttggcagtacatctacgtattagtcatcgctattaccatgtcgaggccacgttctgcttcactctccccatctcccccccctccccacccccaattttgtatttatttattttttaattattttgtgcagcgatgggggcggggggggggggcgcgcgccaggcggggcggggcggggcgaggggcggggcggggcgaggcggagaggtgcggcggcagccaatcagagcggcgcgctccgaaagtttccttttatggcgaggcggcggcggcggcggccctataaaaagcgaagcgcgcggcgggcgggagcaagcttcgtttagtgaaccgtcagatcgcctggagacgccatccacgctgttttgacctccatagaagacaccgggaccgatccagcctccgcggattcgaatcccggccgggaacggtgcattggaacgcggattccccgtgccaagagtgacgtaagtaccgcctatagagtctataggcccacaaaaaatgctttcttcttttaatatacttttttgtttatcttatttctaatactttccctaatctctttctttcagggcaataatgatacaatgtatcatgcctctttgcaccattctaaagaataacagtgataatttctgggttaaggcaatagcaatatttctgcatataaatatttctgcatataaattgtaactgatgtaagaggtttcatattgctaatagcagctacaatccagctaccattctgcttttattttatggttgggataaggctggattattctgagtccaagctaggcccttttgctaatcatgttcatacctcttatcttcctcccacagctcctgggcaacgtgctggtctgtgtgctggcccatcactttggcaaagaattgggattcgaaccggtgccgccaccatggaattcagcagccccagcagagaggaatgccccaagcctctgagccgggtgtcaatcatggccggatctctgacaggactgctgctgcttcaggccgtgtcttgggcttctggcgctagaccttgcatccccaagagcttcggctacagcagcgtcgtgtgcgtgtgcaatgccacctactgcgacagcttcgaccctcctacctttcctgctctgggcaccttcagcagatacgagagcaccagatccggcagacggatggaactgagcatgggacccatccaggccaatcacacaggcactggcctgctgctgacactgcagcctgagcagaaattccagaaagtgaaaggcttcggcggagccatgacagatgccgccgctctgaatatcctggctctgtctccaccagctcagaacctgctgctcaagagctacttcagcgaggaaggcatcggctacaacatcatcagagtgcccatggccagctgcgacttcagcatcaggacctacacctacgccgacacacccgacgatttccagctgcacaacttcagcctgcctgaagaggacaccaagctgaagatccctctgatccacagagccctgcagctggcacaaagacccgtgtcactgctggcctctccatggacatctcccacctggctgaaaacaaatggcgccgtgaatggcaagggcagcctgaaaggccaacctggcgacatctaccaccagacctgggccagatacttcgtgaagttcctggacgcctatgccgagcacaagctgcagttttgggccgtgacagccgagaacgaaccttctgctggactgctgagcggctacccctttcagtgcctgggctttacacccgagcaccagcgggactttatcgcccgtgatctgggacccacactggccaatagcacccaccataatgtgcggctgctgatgctggacgaccagagactgcttctgccccactgggctaaagtggtgctgacagatcctgaggccgccaaatacgtgcacggaatcgccgtgcactggtatctggactttctggcccctgccaaggccacactgggagagacacacagactgttccccaacaccatgctgttcgccagcgaagcctgtgtgggcagcaagttttgggaacagagcgtgcggctcggcagctgggatagaggcatgcagtacagccacagcatcatcaccaacctgctgtaccacgtcgtcggctggaccgactggaatctggccctgaatcctgaaggcggccctaactgggtccgaaacttcgtggacagccccatcatcgtggacatcaccaaggacaccttctacaagcagcccatgttctaccacctgggacacttcagcaagttcatccccgagggctctcagcgcgttggactggtggcttcccagaagaacgatctggacgccgtggctctgatgcaccctgatggatctgctgtggtggtggtcctgaaccgcagcagcaaagatgtgcccctgaccatcaaggatcccgccgtgggattcctggaaacaatcagccctggctactccatccacacctacctgtggcgtagacagggaggggggggttcgggtggcggcggaagtgggggcggtggttcttccgtaatcgacgccttacagtataagctggagggaaccaccagattgacaaggaaacgagggcttaagcttgctactgcactatccctgagcaataaattttagtaactcgaggacggggtgaactacgcctgaggatccgatctttttccctctgccaaaaattatggggacatcatgaagccccttgagcatctgacttctggctaataaaggaaatttattttcattgcaatagtgtgttggaattttttgtgtctctcactcggcctaggtagataagtagcatggcgggttaatcattaactacaaggaacccctagtgatggagttggccactccctctctgcgcgctcgctcgctcactgaggccgggcgaccaaaggtcgcccgacgcccgggctttgcccgggcggcctcagtgagcgagcgagcgcgcag

SEQ ID NO: 1770 - DNA, 3500 bp, synthetic construct
  misc_feature 1..3500: note = source = /note="Description of Artificial Sequence: Synthetic polynucleotide"
  source 1..3500: mol_type = other DNA
ctgcgcgctcgctcgctcactgaggccgcccgggcaaagcccgggcgtcgggcgacctttggtcgcccggcctcagtgagcgagcgagcgcgcagagagggagtggccaactccatcactaggggttccttgtagttaatgattaacccgccatgctacttatctaccagggtaatggggatcctctagaactatagctagtcgacattgattattgactagttattaatagtaatcaattacggggtcattagttcatagcccatatatggagttccgcgttacataacttacggtaaatggcccgcctggctgaccgcccaacgacccccgcccattgacgtcaataatgacgtatgttcccatagtaacgccaatagggactttccattgacgtcaatgggtggagtatttacggtaaactgcccacttggcagtacatcaagtgtatcatatgccaagtacgccccctattgacgtcaatgacggtaaatggcccgcctggcattatgcccagtacatgaccttatgggactttcctacttggcagtacatctacgtattagtcatcgctattaccatgtcgaggccacgttctgcttcactctccccatctcccccccctccccacccccaattttgtatttatttattttttaattattttgtgcagcgatgggggcggggggggggggcgcgcgccaggcggggcggggcggggcgaggggcggggcggggcgaggcggagaggtgcggcggcagccaatcagagcggcgcgctccgaaagtttccttttatggcgaggcggcggcggcggcggccctataaaaagcgaagcgcgcggcgggcgggagcaagcttcgtttagtgaaccgtcagatcgcctggagacgccatccacgctgttttgacctccatagaagacaccgggaccgatccagcctccgcggattcgaatcccggccgggaacggtgcattggaacgcggattccccgtgccaagagtgacgtaagtaccgcctatagagtctataggcccacaaaaaatgctttcttcttttaatatacttttttgtttatcttatttctaatactttccctaatctctttctttcagggcaataatgatacaatgtatcatgcctctttgcaccattctaaagaataacagtgataatttctgggttaaggcaatagcaatatttctgcatataaatatttctgcatataaattgtaactgatgtaagaggtttcatattgctaatagcagctacaatccagctaccattctgcttttattttatggttgggataaggctggattattctgagtccaagctaggcccttttgctaatcatgttcatacctcttatcttcctcccacagctcctgggcaacgtgctggtctgtgtgctggcccatcactttggcaaagaattgggattcgaaccggtgccgccaccatggaattcagcagccccagcagagaggaatgccccaagcctctgagccgggtgtcaatcatggccggatctctgacaggactgctgctgcttcaggccgtgtcttgggcttctggctatggcaggaaaaagcggaggcaaaggcgccgccccccccagggaggggggggttcgggtggcggcggaagtgggggcggtggttctgctagaccttgcatccccaagagcttcggctacagcagcgtcgtgtgcgtgtgcaatgccacctactgcgacagcttcgaccctcctacctttcctgctctgggcaccttcagcagatacgagagcaccagatccggcagacggatggaactgagcatgggacccatccaggccaatcacacaggcactggcctgctgctgacactgcagcctgagcagaaattccagaaagtgaaaggcttcggcggagccatgacagatgccgccgctctgaatatcctggctctgtctccaccagctcagaacctgctgctcaagagctacttcagcgaggaaggcatcggctacaacatcatcagagtgcccatggccagctgcgacttcagcatcaggacctacacctacgccgacacacccgacgatttccagctgcacaacttcagcctgcctgaagaggacaccaagctgaagatccctctgatccacagagccctgcagctggcacaaagacccgtgtcactgctggcctctccatggacatctcccacctggctgaaaacaaatggcgccgtgaatggcaagggcagcctgaaaggccaacctggcgacatctaccaccagacctgggccagatacttcgtgaagttcctggacgcctatgccgagcacaagctgcagttttgggccgtgacagccgagaacgaaccttctgctggactgctgagcggctacccctttcagtgcctgggctttacacccgagcaccagcgggactttatcgcccgtgatctgggacccacactggccaatagcacccaccataatgtgcggctgctgatgctggacgaccagagactgcttctgccccactgggctaaagtggtgctgacagatcctgaggccgccaaatacgtgcacggaatcgccgtgcactggtatctggactttctggcccctgccaaggccacactgggagagacacacagactgttccccaacaccatgctgttcgccagcgaagcctgtgtgggcagcaagttttgggaacagagcgtgcggctcggcagctgggatagaggcatgcagtacagccacagcatcatcaccaacctgctgtaccacgtcgtcggctggaccgactggaatctggccctgaatcctgaaggcggccctaactgggtccgaaacttcgtggacagccccatcatcgtggacatcaccaaggacaccttctacaagcagcccatgttctaccacctgggacacttcagcaagttcatccccgagggctctcagcgcgttggactggtggcttcccagaagaacgatctggacgccgtggctctgatgcaccctgatggatctgctgtggtggtggtcctgaaccgcagcagcaaagatgtgcccctgaccatcaaggatcccgccgtgggattcctggaaacaatcagccctggctactccatccacacctacctgtggcgtagacagtagtaactcgaggacggggtgaactacgcctgaggatccgatctttttccctctgccaaaaattatggggacatcatgaagccccttgagcatctgacttctggctaataaaggaaatttattttcattgcaatagtgtgttggaattttttgtgtctctcactcggcctaggtagataagtagcatggcgggttaatcattaactacaaggaacccctagtgatggagttggccactccctctctgcgcgctcgctcgctcactgaggccgggcgaccaaaggtcgcccgacgcccgggctttgcccgggcggcctcagtgagcgagcgagcgcgcag

SEQ ID NO: 1771 - DNA, 3458 bp, synthetic construct
  misc_feature 1..3458: note = source = /note="Description of Artificial Sequence: Synthetic polynucleotide"
  source 1..3458: mol_type = other DNA
ctgcgcgctcgctcgctcactgaggccgcccgggcaaagcccgggcgtcgggcgacctttggtcgcccggcctcagtgagcgagcgagcgcgcagagagggagtggccaactccatcactaggggttccttgtagttaatgattaacccgccatgctacttatctaccagggtaatggggatcctctagaactatagctagtcgacattgattattgactagttattaatagtaatcaattacggggtcattagttcatagcccatatatggagttccgcgttacataacttacggtaaatggcccgcctggctgaccgcccaacgacccccgcccattgacgtcaataatgacgtatgttcccatagtaacgccaatagggactttccattgacgtcaatgggtggagtatttacggtaaactgcccacttggcagtacatcaagtgtatcatatgccaagtacgccccctattgacgtcaatgacggtaaatggcccgcctggcattatgcccagtacatgaccttatgggactttcctacttggcagtacatctacgtattagtcatcgctattaccatgtcgaggccacgttctgcttcactctccccatctcccccccctccccacccccaattttgtatttatttattttttaattattttgtgcagcgatgggggcggggggggggggcgcgcgccaggcggggcggggcggggcgaggggcggggcggggcgaggcggagaggtgcggcggcagccaatcagagcggcgcgctccgaaagtttccttttatggcgaggcggcggcggcggcggccctataaaaagcgaagcgcgcggcgggcgggagcaagcttcgtttagtgaaccgtcagatcgcctggagacgccatccacgctgttttgacctccatagaagacaccgggaccgatccagcctccgcggattcgaatcccggccgggaacggtgcattggaacgcggattccccgtgccaagagtgacgtaagtaccgcctatagagtctataggcccacaaaaaatgctttcttcttttaatatacttttttgtttatcttatttctaatactttccctaatctctttctttcagggcaataatgatacaatgtatcatgcctctttgcaccattctaaagaataacagtgataatttctgggttaaggcaatagcaatatttctgcatataaatatttctgcatataaattgtaactgatgtaagaggtttcatattgctaatagcagctacaatccagctaccattctgcttttattttatggttgggataaggctggattattctgagtccaagctaggcccttttgctaatcatgttcatacctcttatcttcctcccacagctcctgggcaacgtgctggtctgtgtgctggcccatcactttggcaaagaattgggattcgaaccggtgccgccaccatggaattcagcagccccagcagagaggaatgccccaagcctctgagccgggtgtcaatcatggccggatctctgacaggactgctgctgcttcaggccgtgtcttgggcttctggcgctagaccttgcatccccaagagcttcggctacagcagcgtcgtgtgcgtgtgcaatgccacctactgcgacagcttcgaccctcctacctttcctgctctgggcaccttcagcagatacgagagcaccagatccggcagacggatggaactgagcatgggacccatccaggccaatcacacaggcactggcctgctgctgacactgcagcctgagcagaaattccagaaagtgaaaggcttcggcggagccatgacagatgccgccgctctgaatatcctggctctgtctccaccagctcagaacctgctgctcaagagctacttcagcgaggaaggcatcggctacaacatcatcagagtgcccatggccagctgcgacttcagcatcaggacctacacctacgccgacacacccgacgatttccagctgcacaacttcagcctgcctgaagaggacaccaagctgaagatccctctgatccacagagccctgcagctggcacaaagacccgtgtcactgctggcctctccatggacatctcccacctggctgaaaacaaatggcgccgtgaatggcaagggcagcctgaaaggccaacctggcgacatctaccaccagacctgggccagatacttcgtgaagttcctggacgcctatgccgagcacaagctgcagttttgggccgtgacagccgagaacgaaccttctgctggactgctgagcggctacccctttcagtgcctgggctttacacccgagcaccagcgggactttatcgcccgtgatctgggacccacactggccaatagcacccaccataatgtgcggctgctgatgctggacgaccagagactgcttctgccccactgggctaaagtggtgctgacagatcctgaggccgccaaatacgtgcacggaatcgccgtgcactggtatctggactttctggcccctgccaaggccacactgggagagacacacagactgttccccaacaccatgctgttcgccagcgaagcctgtgtgggcagcaagttttgggaacagagcgtgcggctcggcagctgggatagaggcatgcagtacagccacagcatcatcaccaacctgctgtaccacgtcgtcggctggaccgactggaatctggccctgaatcctgaaggcggccctaactgggtccgaaacttcgtggacagccccatcatcgtggacatcaccaaggacaccttctacaagcagcccatgttctaccacctgggacacttcagcaagttcatccccgagggctctcagcgcgttggactggtggcttcccagaagaacgatctggacgccgtggctctgatgcaccctgatggatctgctgtggtggtggtcctgaaccgcagcagcaaagatgtgcccctgaccatcaaggatcccgccgtgggattcctggaaacaatcagccctggctactccatccacacctacctgtggcgtagacagaagtttgaaagacagcagaaaatcctggatcagagattcttcgagtagtaactcgaggacggggtgaactacgcctgaggatccgatctttttccctctgccaaaaattatggggacatcatgaagccccttgagcatctgacttctggctaataaaggaaatttattttcattgcaatagtgtgttggaattttttgtgtctctcactcggcctaggtagataagtagcatggcgggttaatcattaactacaaggaacccctagtgatggagttggccactccctctctgcgcgctcgctcgctcactgaggccgggcgaccaaaggtcgcccgacgcccgggctttgcccgggcggcctcagtgagcgagcgagcgcgcag

SEQ ID NO: 1772 - DNA, 1608 bp, synthetic construct
  misc_feature 1..1608: note = source = /note="Description of Artificial Sequence: Synthetic polynucleotide"
  source 1..1608: mol_type = other DNA
atggaattctctagcccatctagagaggaatgtcctaagcctctgtcaagagtgtccatcatggccggcagcctgacaggcctgctgctgctgcaggccgtgtcctgggccagtggagcccggccctgcatccctaagtccttcggctattctagcgtggtctgcgtgtgtaatgccacttactgcgacagcttcgaccctcctaccttccccgcccttggaacattcagcagatacgagagcaccagaagcggcagaagaatggaactgagcatgggcccaatccaggccaaccacaccggcaccggcctgctgctgacactgcaacctgagcagaagttccagaaggtgaagggatttggaggcgccatgaccgacgctgctgctctgaacatcctggccctctccccacctgctcagaacctgctgcttaaaagctacttcagcgaggaaggcatcggctataacatcatcagagtgcccatggccagctgcgacttcagcatcagaacatacacctacgccgatacacctgatgacttccaactgcacaacttcagcctgcctgaagaggacacaaagctgaaaatccccctgatccaccgggccctgcagctggcccagagacctgtgagcctgctggcctctccttggacaagccccacctggctgaagaccaatggagctgtgaacggcaagggcagcctgaagggccagcccggcgacatctaccaccaaacctgggctcgctacttcgtgaaattcctggacgcctacgctgagcataagctgcaattttgggccgttacagccgagaacgagccttctgccggcctgctgtctggatatcctttccagtgcctgggcttcacccctgagcaccagagagactttatcgccagagatctggggcctaccctggctaacagcacacaccacaacgtgcggctgctgatgctggacgatcagaggctgctgctcccccactgggccaaggtggtgctgacagatccggaggccgccaaatacgtgcacggcatcgccgtccactggtacctggatttcctggcccctgccaaggccaccctgggcgagacacatagactgtttcctaataccatgctgttcgccagcgaggcctgcgtgggcagcaagttctgggaacagagcgtgcggctgggcagctgggacagaggaatgcagtacagccacagcatcattaccaacctgctgtaccacgtggtgggctggaccgactggaacctggccctgaaccccgaaggcggccccaactgggtgcggaacttcgtggactctcctatcatcgtggatattaccaaggataccttttacaagcagcctatgttctaccacctgggccacttcagcaagttcatccctgagggctctcagcgggtgggcctggtggcctctcagaaaaacgacctggatgccgttgccctgatgcaccccgacggcagcgccgtggtggtcgtcctgaatagaagctccaaggacgtgcctctgaccatcaaggaccccgctgtgggatttctggaaaccatcagccctggctacagcatccacacctacctgtggcggcggcag

SEQ ID NO: 1773 - DNA, 1491 bp, synthetic construct
  misc_feature 1..1491: note = source = /note="Description of Artificial Sequence: Synthetic polynucleotide"
  source 1..1491: mol_type = other DNA
gcccggccctgcatccctaagtccttcggctattctagcgtggtctgcgtgtgtaatgccacttactgcgacagcttcgaccctcctaccttccccgcccttggaacattcagcagatacgagagcaccagaagcggcagaagaatggaactgagcatgggcccaatccaggccaaccacaccggcaccggcctgctgctgacactgcaacctgagcagaagttccagaaggtgaagggatttggaggcgccatgaccgacgctgctgctctgaacatcctggccctctccccacctgctcagaacctgctgcttaaaagctacttcagcgaggaaggcatcggctataacatcatcagagtgcccatggccagctgcgacttcagcatcagaacatacacctacgccgatacacctgatgacttccaactgcacaacttcagcctgcctgaagaggacacaaagctgaaaatccccctgatccaccgggccctgcagctggcccagagacctgtgagcctgctggcctctccttggacaagccccacctggctgaagaccaatggagctgtgaacggcaagggcagcctgaagggccagcccggcgacatctaccaccaaacctgggctcgctacttcgtgaaattcctggacgcctacgctgagcataagctgcaattttgggccgttacagccgagaacgagccttctgccggcctgctgtctggatatcctttccagtgcctgggcttcacccctgagcaccagagagactttatcgccagagatctggggcctaccctggctaacagcacacaccacaacgtgcggctgctgatgctggacgatcagaggctgctgctcccccactgggccaaggtggtgctgacagatccggaggccgccaaatacgtgcacggcatcgccgtccactggtacctggatttcctggcccctgccaaggccaccctgggcgagacacatagactgtttcctaataccatgctgttcgccagcgaggcctgcgtgggcagcaagttctgggaacagagcgtgcggctgggcagctgggacagaggaatgcagtacagccacagcatcattaccaacctgctgtaccacgtggtgggctggaccgactggaacctggccctgaaccccgaaggcggccccaactgggtgcggaacttcgtggactctcctatcatcgtggatattaccaaggataccttttacaagcagcctatgttctaccacctgggccacttcagcaagttcatccctgagggctctcagcgggtgggcctggtggcctctcagaaaaacgacctggatgccgttgccctgatgcaccccgacggcagcgccgtggtggtcgtcctgaatagaagctccaaggacgtgcctctgaccatcaaggaccccgctgtgggatttctggaaaccatcagccctggctacagcatccacacctacctgtggcggcggcag

SEQ ID NO: 1774 - protein, 536 aa, synthetic construct; identical to SEQ ID NO: 1740
  REGION 1..536: note = source = /note="Description of Artificial Sequence: Synthetic polypeptide"

SEQ ID NO: 1775 - protein, 497 aa, synthetic construct
  REGION 1..497: note = source = /note="Description of Artificial Sequence: Synthetic polypeptide"
ARPCIPKSFGYSSVVCVCNATYCDSFDPPTFPALGTFSRYESTRSGRRMELSMGPIQANHTGTGLLLTLQPEQKFQKVKGFGGAMTDAAALNILALSPPAQNLLLKSYFSEEGIGYNIIRVPMASCDFSIRTYTYADTPDDFQLHNFSLPEEDTKLKIPLIHRALQLAQRPVSLLASPWTSPTWLKTNGAVNGKGSLKGQPGDIYHQTWARYFVKFLDAYAEHKLQFWAVTAENEPSAGLLSGYPFQCLGFTPEHQRDFIARDLGPTLANSTHHNVRLLMLDDQRLLLPHWAKVVLTDPEAAKYVHGIAVHWYLDFLAPAKATLGETHRLFPNTMLFASEACVGSKFWEQSVRLGSWDRGMQYSHSIITNLLYHVVGWTDWNLALNPEGGPNWVRNFVDSPIIVDITKDTFYKQPMFYHLGHFSKFIPEGSQRVGLVASQKNDLDAVALMHPDGSAVVVVLNRSSKDVPLTIKDPAVGFLETISPGYSIHTYLWRRQ

SEQ ID NO: 1776 - DNA, 1608 bp, synthetic construct
  misc_feature 1..1608: note = source = /note="Description of Artificial Sequence: Synthetic polynucleotide"
  source 1..1608: mol_type = other DNA
atggagttttcaagtccttccagagaggaatgtcccaagcctttgagtagggtaagcatcatggctggcagcctcacaggattgcttctacttcaggcagtgtcgtgggcatcaggtgcccgcccctgcatccctaaaagcttcggctacagctcggtggtgtgtgtctgcaatgccacatactgtgactcctttgaccccccgacctttcctgcccttggtaccttcagccgctatgagagtacacgcagtgggcgacggatggagctgagtatggggcccatccaggctaatcacacgggcacaggcctgctactgaccctgcagccagaacagaagttccagaaagtgaagggatttggaggggccatgacagatgctgctgctctcaacatccttgccctgtcaccccctgcccaaaatttgctacttaaatcgtacttctctgaagaaggaatcggatataacatcatccgggtacccatggccagctgtgacttctccatccgcacctacacctatgcagacacccctgatgatttccagttgcacaacttcagcctcccagaggaagataccaagctcaagatacccctgattcaccgagccctgcagttggcccagcgtcccgtttcactccttgccagcccctggacatcacccacttggctcaagaccaatggagcggtgaatgggaaggggtcactcaagggacagcccggagacatctaccaccagacctgggccagatactttgtgaagttcctggatgcctatgctgagcacaagttacagttctgggcagtgacagctgaaaatgagccttctgctgggctgttgagtggataccccttccagtgcctgggcttcacccctgaacatcagcgagacttcattgcccgtgacctaggtcctaccctcgccaacagtactcaccacaatgtccgcctactcatgctggatgaccaacgcttgctgctgccccactgggcaaaggtggtactgacagacccagaagcagctaaatatgttcatggcattgctgtacattggtacctggactttctggctccagccaaagccaccctaggggagacacaccgcctgttccccaacaccatgctctttgcctcagaggcctgtgtgggctccaagttctgggagcagagtgtgcggctaggctcctgggatcgagggatgcagtacagccacagcatcatcacgaacctcctgtaccatgtggtcggctggaccgactggaaccttgccctgaaccccgaaggaggacccaattgggtgcgtaactttgtcgacagtcccatcattgtagacatcaccaaggacacgttttacaaacagcccatgttctaccaccttggccacttcagcaagttcattcctgagggctcccagagagtggggctggttgccagtcagaagaacgacctggacgcagtggcactgatgcatcccgatggctctgctgttgtggtcgtgctaaaccgctcctctaaggatgtgcctcttaccatcaaggatcctgctgtgggcttcctggagacaatctcacctggctactccattcacacctacctgtggcgtcgccag

SEQ ID NO: 1777 - DNA, 1491 bp, synthetic construct
  misc_feature 1..1491: note = source = /note="Description of Artificial Sequence: Synthetic polynucleotide"
  source 1..1491: mol_type = other DNA
gcccgcccctgcatccctaaaagcttcggctacagctcggtggtgtgtgtctgcaatgccacatactgtgactcctttgaccccccgacctttcctgcccttggtaccttcagccgctatgagagtacacgcagtgggcgacggatggagctgagtatggggcccatccaggctaatcacacgggcacaggcctgctactgaccctgcagccagaacagaagttccagaaagtgaagggatttggaggggccatgacagatgctgctgctctcaacatccttgccctgtcaccccctgcccaaaatttgctacttaaatcgtacttctctgaagaaggaatcggatataacatcatccgggtacccatggccagctgtgacttctccatccgcacctacacctatgcagacacccctgatgatttccagttgcacaacttcagcctcccagaggaagataccaagctcaagatacccctgattcaccgagccctgcagttggcccagcgtcccgtttcactccttgccagcccctggacatcacccacttggctcaagaccaatggagcggtgaatgggaaggggtcactcaagggacagcccggagacatctaccaccagacctgggccagatactttgtgaagttcctggatgcctatgctgagcacaagttacagttctgggcagtgacagctgaaaatgagccttctgctgggctgttgagtggataccccttccagtgcctgggcttcacccctgaacatcagcgagacttcattgcccgtgacctaggtcctaccctcgccaacagtactcaccacaatgtccgcctactcatgctggatgaccaacgcttgctgctgccccactgggcaaaggtggtactgacagacccagaagcagctaaatatgttcatggcattgctgtacattggtacctggactttctggctccagccaaagccaccctaggggagacacaccgcctgttccccaacaccatgctctttgcctcagaggcctgtgtgggctccaagttctgggagcagagtgtgcggctaggctcctgggatcgagggatgcagtacagccacagcatcatcacgaacctcctgtaccatgtggtcggctggaccgactggaaccttgccctgaaccccgaaggaggacccaattgggtgcgtaactttgtcgacagtcccatcattgtagacatcaccaaggacacgttttacaaacagcccatgttctaccaccttggccacttcagcaagttcattcctgagggctcccagagagtggggctggttgccagtcagaagaacgacctggacgcagtggcactgatgcatcccgatggctctgctgttgtggtcgtgctaaaccgctcctctaaggatgtgcctcttaccatcaaggatcctgctgtgggcttcctggagacaatctcacctggctactccattcacacctacctgtggcgtcgccag

SEQ ID NO: 1778 - protein, 536 aa, synthetic construct; identical to SEQ ID NO: 1740
  REGION 1..536: note = source = /note="Description of Artificial Sequence: Synthetic polypeptide"

SEQ ID NO: 1779 - protein, 497 aa, synthetic construct; identical to SEQ ID NO: 1775
  REGION 1..497: note = source = /note="Description of Artificial Sequence: Synthetic polypeptide"

SEQ ID NO: 1780 - DNA, 1608 bp, synthetic construct
  misc_feature 1..1608: note = source = /note="Description of Artificial Sequence: Synthetic polynucleotide"
  source 1..1608: mol_type = other DNA
atggaattcagcagccccagcagagaggaatgccccaagcctctgagccgggtgtcaatcatggccggatctctgacaggactgctgctgcttcaggccgtgtcttgggcttctggcgctagaccttgcatccccaagagcttcggctacagcagcgtcgtgtgcgtgtgcaatgccacctactgcgacagcttcgaccctcctacctttcctgctctgggcaccttcagcagatacgagagcaccagatccggcagacggatggaactgagcatgggacccatccaggccaatcacacaggcactggcctgctgctgacactgcagcctgagcagaaattccagaaagtgaaaggcttcggcggagccatgacagatgccgccgctctgaatatcctggctctgtctccaccagctcagaacctgctgctcaagagctacttcagcgaggaaggcatcggctacaacatcatcagagtgcccatggccagctgcgacttcagcatcaggacctacacctacgccgacacacccgacgatttccagctgcacaacttcagcctgcctgaagaggacaccaagctgaagatccctctgatccacagagccctgcagctggcacaaagacccgtgtcactgctggcctctccatggacatctcccacctggctgaaaacaaatggcgccgtgaatggcaagggcagcctgaaaggccaacctggcgacatctaccaccagacctgggccagatacttcgtgaagttcctggacgcctatgccgagcacaagctgcagttttgggccgtgacagccgagaacgaaccttctgctggactgctgagcggctacccctttcagtgcctgggctttacacccgagcaccagcgggactttatcgcccgtgatctgggacccacactggccaatagcacccaccataatgtgcggctgctgatgctggacgaccagagactgcttctgccccactgggctaaagtggtgctgacagatcctgaggccgccaaatacgtgcacggaatcgccgtgcactggtatctggactttctggcccctgccaaggccacactgggagagacacacagactgttccccaacaccatgctgttcgccagcgaagcctgtgtgggcagcaagttttgggaacagagcgtgcggctcggcagctgggatagaggcatgcagtacagccacagcatcatcaccaacctgctgtaccacgtcgtcggctggaccgactggaatctggccctgaatcctgaaggcggccctaactgggtccgaaacttcgtggacagccccatcatcgtggacatcaccaaggacaccttctacaagcagcccatgttctaccacctgggacacttcagcaagttcatccccgagggctctcagcgcgttggactggtggcttcccagaagaacgatctggacgccgtggctctgatgcaccctgatggatctgctgtggtggtggtcctgaaccgcagcagcaaagatgtgcccctgaccatcaaggatcccgccgtgggattcctggaaacaatcagccctggctactccatccacacctacctgtggcgtagacag

SEQ ID NO: 1781 - DNA, 1491 bp, synthetic construct
  misc_feature 1..1491: note = source = /note="Description of Artificial Sequence: Synthetic polynucleotide"
  source 1..1491: mol_type = other DNA
gctagaccttgcatccccaagagcttcggctacagcagcgtcgtgtgcgtgtgcaatgccacctactgcgacagcttcgaccctcctacctttcctgctctgggcaccttcagcagatacgagagcaccagatccggcagacggatggaactgagcatgggacccatccaggccaatcacacaggcactggcctgctgctgacactgcagcctgagcagaaattccagaaagtgaaaggcttcggcggagccatgacagatgccgccgctctgaatatcctggctctgtctccaccagctcagaacctgctgctcaagagctacttcagcgaggaaggcatcggctacaacatcatcagagtgcccatggccagctgcgacttcagcatcaggacctacacctacgccgacacacccgacgatttccagctgcacaacttcagcctgcctgaagaggacaccaagctgaagatccctctgatccacagagccctgcagctggcacaaagacccgtgtcactgctggcctctccatggacatctcccacctggctgaaaacaaatggcgccgtgaatggcaagggcagcctgaaaggccaacctggcgacatctaccaccagacctgggccagatacttcgtgaagttcctggacgcctatgccgagcacaagctgcagttttgggccgtgacagccgagaacgaaccttctgctggactgctgagcggctacccctttcagtgcctgggctttacacccgagcaccagcgggactttatcgcccgtgatctgggacccacactggccaatagcacccaccataatgtgcggctgctgatgctggacgaccagagactgcttctgccccactgggctaaagtggtgctgacagatcctgaggccgccaaatacgtgcacggaatcgccgtgcactggtatctggactttctggcccctgccaaggccacactgggagagacacacagactgttccccaacaccatgctgttcgccagcgaagcctgtgtgggcagcaagttttgggaacagagcgtgcggctcggcagctgggatagaggcatgcagtacagccacagcatcatcaccaacctgctgtaccacgtcgtcggctggaccgactggaatctggccctgaatcctgaaggcggccctaactgggtccgaaacttcgtggacagccccatcatcgtggacatcaccaaggacaccttctacaagcagcccatgttctaccacctgggacacttcagcaagttcatccccgagggctctcagcgcgttggactggtggcttcccagaagaacgatctggacgccgtggctctgatgcaccctgatggatctgctgtggtggtggtcctgaaccgcagcagcaaagatgtgcccctgaccatcaaggatcccgccgtgggattcctggaaacaatcagccctggctactccatccacacctacctgtggcgtagacag

SEQ ID NO: 1782 - protein, 536 aa, synthetic construct; identical to SEQ ID NO: 1740
  REGION 1..536: note = source = /note="Description of Artificial Sequence: Synthetic polypeptide"

SEQ ID NO: 1783 - protein, 497 aa, synthetic construct; identical to SEQ ID NO: 1775
  REGION 1..497: note = source = /note="Description of Artificial Sequence: Synthetic polypeptide"

SEQ ID NO: 1784 - protein, 82 aa, Homo sapiens
DGGFCEVCKKLVGYLDRNLEKNSTKQEILAALEKGCSFLPDPYQKQCDQFVAEYEPVLIEILVEVMDPSFVCLKIGACPSAH

SEQ ID NO: 1785 - protein, 508 aa, Homo sapiens
GPVLGLKECTRGSAVWCQNVKTASDCGAVKHCLQTVWNKPTVKSLPCDICKDVVTAAGDMLKDNATEEEILVYLEKTCDWLPKPNMSASCKEIVDSYLPVILDIIKGEMSRPGEVCSALNLCESLQKHLAELNHQKQLESNKIPELDMTEVVAPFMANIPLLLYPQDGPRSKPQPKDNGDVCQDCIQMVTDIQTAVRTNSTFVQALVEHVKEECDRLGPGMADICKNYISQYSEIAIQMMMHMQPKEICALVGFCDEVKEMPMQTLVPAKVASKNVIPALELVEPIKKHEVPAKSDVYCEVCEFLVKEVTKLIDNNKTEKEILDAFDKMCSKLPKSLSEECQEVVDTYGSSILSILLEEVSPELVCSMLHLCSGTRLPALTVHVTQPKDGGFCEVCKKLVGYLDRNLEKNSTKQEILAALEKGCSFLPDPYQKQCDQFVAEYEPVLIEILVEVMDPSFVCLKIGACPSAHKPLLGTEKCIWGPSYWCQNTETAAQCNAVEHCKRHVWN

SEQ ID NO: 1786 - DNA, 399 bp, Homo sapiens
  source 1..399: mol_type = unassigned DNA
atgtacgccctcttcctcctggccagcctcctgggcgcggctctagccgtgaaagagatgcccatgcagactctggtccccgccaaagtggcctccaagaatgtcatccctgccctggaactggtggagcccattaagaagcacgaggtcccagcaaagtctgatgtttactgtgaggtgtgtgaattcctggtgaaggaggtgaccaagctgattgacaacaacaagactgagaaagaaatactcgacgcttttgacaaaatgtgctcgaagctgccgaagtccctgtcggaagagtgccaggaggtggtggacacgtacggcagctccatcctgtccatcctgctggaggaggtcagccctgagctggtgtgcagcatgctgcacctctgctctggc

SEQ ID NO: 1787 - DNA, 351 bp, Homo sapiens
  source 1..351: mol_type = unassigned DNA
gtgaaagagatgcccatgcagactctggtccccgccaaagtggcctccaagaatgtcatccctgccctggaactggtggagcccattaagaagcacgaggtcccagcaaagtctgatgtttactgtgaggtgtgtgaattcctggtgaaggaggtgaccaagctgattgacaacaacaagactgagaaagaaatactcgacgcttttgacaaaatgtgctcgaagctgccgaagtccctgtcggaagagtgccaggaggtggtggacacgtacggcagctccatcctgtccatcctgctggaggaggtcagccctgagctggtgtgcagcatgctgcacctctgctctggc

SEQ ID NO: 1788 - protein, 133 aa, Homo sapiens
MYALFLLASLLGAALAVKEMPMQTLVPAKVASKNVIPALELVEPIKKHEVPAKSDVYCEVCEFLVKEVTKLIDNNKTEKEILDAFDKMCSKLPKSLSEECQEVVDTYGSSILSILLEEVSPELVCSMLHLCSG

SEQ ID NO: 1789 - protein, 117 aa, Homo sapiens
VKEMPMQTLVPAKVASKNVIPALELVEPIKKHEVPAKSDVYCEVCEFLVKEVTKLIDNNKTEKEILDAFDKMCSKLPKSLSEECQEVVDTYGSSILSILLEEVSPELVCSMLHLCSG

SEQ ID NO: 1790 - DNA, 288 bp, Homo sapiens
  source 1..288: mol_type = unassigned DNA
atgtacgccctcttcctcctggccagcctcctgggcgcggctctagcctctgatgtttactgtgaggtgtgtgaattcctggtgaaggaggtgaccaagctgattgacaacaacaagactgagaaagaaatactcgacgcttttgacaaaatgtgctcgaagctgccgaagtccctgtcggaagagtgccaggaggtggtggacacgtacggcagctccatcctgtccatcctgctggaggaggtcagccctgagctggtgtgcagcatgctgcacctctgctctggc

SEQ ID NO: 1791 - DNA, 240 bp, Homo sapiens
  source 1..240: mol_type = unassigned DNA
tctgatgtttactgtgaggtgtgtgaattcctggtgaaggaggtgaccaagctgattgacaacaacaagactgagaaagaaatactcgacgcttttgacaaaatgtgctcgaagctgccgaagtccctgtcggaagagtgccaggaggtggtggacacgtacggcagctccatcctgtccatcctgctggaggaggtcagccctgagctggtgtgcagcatgctgcacctctgctctggc

SEQ ID NO: 1792 - protein, 96 aa, Homo sapiens
MYALFLLASLLGAALASDVYCEVCEFLVKEVTKLIDNNKTEKEILDAFDKMCSKLPKSLSEECQEVVDTYGSSILSILLEEVSPELVCSMLHLCSG

SEQ ID NO: 1793 - DNA, 42 bp, unidentified
  source 1..42: mol_type = unassigned DNA; note = Human immunodeficiency virus
tatggcaggaaaaagcggaggcaaaggcgccgccccccccag

SEQ ID NO: 1794 - protein, 14 aa, unidentified
  source 1..14: note = Human immunodeficiency virus
YGRKKRRQRRRPPQ

SEQ ID NO: 1795 - DNA, 102 bp, synthetic construct
  misc_feature 1..102: note = source = /note="Description of Artificial Sequence: Synthetic polynucleotide"
  source 1..102: mol_type = other DNA
tccgtaatcgacgccttacagtataagctggagggaaccaccagattgacaaggaaacgagggcttaagcttgctactgcactatccctgagcaataaattt

SEQ ID NO: 1796 - protein, 34 aa, synthetic construct
  REGION 1..34: note = source = /note="Description of Artificial Sequence: Synthetic polypeptide"
SVIDALQYKLEGTTRLTRKRGLKLATALSLSNKF

SEQ ID NO: 1797 - DNA, 54 bp, synthetic construct
  misc_feature 1..54: note = source = /note="Description of Artificial Sequence: Synthetic oligonucleotide"
  source 1..54: mol_type = other DNA
ctacggaagctgcggaagcggctactgctgcggaaacttcggaaacggctactg

SEQ ID NO: 1798 - protein, 18 aa, synthetic construct
  REGION 1..18: note = source = /note="Description of Artificial Sequence: Synthetic peptide"
LRKLRKRLLLRKLRKRLL

SEQ ID NO: 1799 - DNA, 15 bp, synthetic construct
  misc_feature 1..15: note = source = /note="Description of Artificial Sequence: Synthetic oligonucleotide"
  source 1..15: mol_type = other DNA
aagtttgaaagacag

SEQ ID NO: 1800 - protein, 5 aa, synthetic construct
  REGION 1..5: note = source = /note="Description of Artificial Sequence: Synthetic peptide"
KFERQ

SEQ ID NO: 1801 - DNA, 63 bp, synthetic construct
  misc_feature 1..63: note = source = /note="Description of Artificial Sequence: Synthetic oligonucleotide"
  source 1..63: mol_type = other DNA
atgaaggagaccgctgctgcaaagttcgagagacagcatatggatagctccacaagcgccgca

SEQ ID NO: 1802 - protein, 21 aa, synthetic construct
  REGION 1..21: note = source = /note="Description of Artificial Sequence: Synthetic peptide"
MKETAAAKFERQHMDSSTSAA

SEQ ID NO: 1803 - DNA, 15 bp, synthetic construct
  misc_feature 1..15: note = source = /note="Description of Artificial Sequence: Synthetic oligonucleotide"
  source 1..15: mol_type = other DNA
cagaaaatcctggat

SEQ ID NO: 1804 - protein, 5 aa, synthetic construct
  REGION 1..5: note = source = /note="Description of Artificial Sequence: Synthetic peptide"
QKILD

SEQ ID NO: 1805 - DNA, 15 bp, synthetic construct
  misc_feature 1..15: note = source = /note="Description of Artificial Sequence: Synthetic oligonucleotide"
  source 1..15: mol_type = other DNA
cagagattcttcgag

SEQ ID NO: 1806 - protein, 5 aa, synthetic construct
  REGION 1..5: note = source = /note="Description of Artificial Sequence: Synthetic peptide"
QRFFE

SEQ ID NO: 1807 - DNA, 45 bp, synthetic construct
  misc_feature 1..45: note = source = /note="Description of Artificial Sequence: Synthetic oligonucleotide"
  source 1..45: mol_type = other DNA
aagtttgaaagacagcagaaaatcctggatcagagattcttcgag

SEQ ID NO: 1808 - protein, 15 aa, synthetic construct
  REGION 1..15: note = source = /note="Description of Artificial Sequence: Synthetic peptide"
KFERQQKILDQRFFE

SEQ ID NO: 1809 - DNA, 3941 bp, synthetic construct
  misc_feature 1..3941: note = source = /note="Description of Artificial Sequence: Synthetic polynucleotide"
  source 1..3941: mol_type = other DNA
ctgcgcgctcgctcgctcactgaggccgcccgggcaaagcccgggcgtcgggcgacctttggtcgcccggcctcagtgagcgagcgagcgcgcagagagggagtggccaactccatcactaggggttccttgtagttaatgattaacccgccatgctacttatctaccagggtaatggggatcctctagaactatagctagtcgacattgattattgactagttattaatagtaatcaattacggggtcattagttcatagcccatatatggagttccgcgttacataacttacggtaaatggcccgcctggctgaccgcccaacgacccccgcccattgacgtcaataatgacgtatgttcccatagtaacgccaatagggactttccattgacgtcaatgggtggagtatttacggtaaactgcccacttggcagtacatcaagtgtatcatatgccaagtacgccccctattgacgtcaatgacggtaaatggcccgcctggcattatgcccagtacatgaccttatgggactttcctacttggcagtacatctacgtattagtcatcgctattaccatgtcgaggccacgttctgcttcactctccccatctcccccccctccccacccccaattttgtatttatttattttttaattattttgtgcagcgatgggggcggggggggggggcgcgcgccaggcggggcggggcggggcgaggggcggggcggggcgaggcggagaggtgcggcggcagccaatcagagcggcgcgctccgaaagtttccttttatggcgaggcggcggcggcggcggccctataaaaagcgaagcgcgcggcgggcgggagcaagcttcgtttagtgaaccgtcagatcgcctggagacgccatccacgctgttttgacctccatagaagacaccgggaccgatccagcctccgcggattcgaatcccggccgggaacggtgcattggaacgcggattccccgtgccaagagtgacgtaagtaccgcctatagagtctataggcccacaaaaaatgctttcttcttttaatatacttttttgtttatcttatttctaatactttccctaatctctttctttcagggcaataatgatacaatgtatcatgcctctttgcaccattctaaagaataacagtgataatttctgggttaaggcaatagcaatatttctgcatataaatatttctgcatataaattgtaactgatgtaagaggtttcatattgctaatagcagctacaatccagctaccattctgcttttattttatggttgggataaggctggattattctgagtccaagctaggcccttttgctaatcatgttcatacctcttatcttcctcccacagctcctgggcaacgtgctggtctgtgtgctggcccatcactttggcaaagaattgggattcgaaccggtgccgccaccatggaattcagcagccccagcagagaggaatgccccaagcctctgagccgggtgtcaatcatggccggatctctgacaggactgctgctgcttcaggccgtgtcttgggcttctggcatgaaggagaccgctgctgcaaagttcgagagacagcatatggatagctccacaagcgccgcagctagaccttgcatccccaagagcttcggctacagcagcgtcgtgtgcgtgtgcaatgccacctactgcgacagcttcgaccctcctacctttcctgctctgggcaccttcagcagatacgagagcaccagatccggcagacggatggaactgagcatgggacccatccaggccaatcacacaggcactggcctgctgctgacactgcagcctgagcagaaattccagaaagtgaaaggcttcggcggagccatgacagatgccgccgctctgaatatcctggctctgtctccaccagctcagaacctgctgctcaagagctacttcagcgaggaaggcatcggctacaacatcatcagagtgcccatggccagctgcgacttcagcatcaggacctacacctacgccgacacacccgacgatttccagctgcacaacttcagcctgcctgaagaggacaccaagctgaagatccctctgatccacagagccctgcagctggcacaaagacccgtgtcactgctggcctctccatggacatctcccacctggctgaaaacaaatggcgccgtgaatggcaagggcagcctgaaaggccaacctggcgacatctaccaccagacctgggccagatacttcgtgaagttcctggacgcctatgccgagcacaagctgcagttttgggccgtgacagccgagaacgaaccttctgctggactgctgagcggctacccctttcagtgcctgggctttacacccgagcaccagcgggactttatcgcccgtgatctgggacccacactggccaatagcacccaccataatgtgcggctgctgatgctggacgaccagagactgcttctgccccactgggctaaagtggtgctgacagatcctgaggccgccaaatacgtgcacggaatcgccgtgcactggtatctggactttctggcccctgccaaggccacactgggagagacacacagactgttccccaacaccatgctgttcgccagcgaagcctgtgtgggcagcaagttttgggaacagagcgtgcggctcggcagctgggatagaggcatgcagtacagccacagcatcatcaccaacctgctgtaccacgtcgtcggctggaccgactggaatctggccctgaatcctgaaggcggccctaactgggtccgaaacttcgtggacagccccatcatcgtggacatcaccaaggacaccttctacaagcagcccatgttctaccacctgggacacttcagcaagttcatccccgagggctctcagcgcgttggactggtggcttcccagaagaacgatctggacgccgtggctctgatgcaccctgatggatctgctgtggtggtggtcctgaaccgcagcagcaaagatgtgcccctgaccatcaaggatcccgccgtgggattcctggaaacaatcagccctggctactccatccacacctacctgtggcgtagacagagaaagaggcgagagggcagaggaagtcttctaacatgcggtgacgtggaggagaatcccggccctatgtacgccctcttcctcctggccagcctcctgggcgcggctctagccgtgaaagagatgcccatgcagactctggtccccgccaaagtggcctccaagaatgtcatccctgccctggaactggtggagcccattaagaagcacgaggtcccagcaaagtctgatgtttactgtgaggtgtgtgaattcctggtgaaggaggtgaccaagctgattgacaacaacaagactgagaaagaaatactcgacgcttttgacaaaatgtgctcgaagctgccgaagtccctgtcggaagagtgccaggaggtggtggacacgtacggcagctccatcctgtccatcctgctggaggaggtcagccctgagctggtgtgcagcatgctgcacctctgctctggctagtaactcgaggacggggtgaactacgcctgaggatccgatctttttccctctgccaaaaattatggggacatcatgaagccccttgagcatctgacttctggctaataaaggaaatttattttcattgcaatagtgtgttggaattttttgtgtctctcactcggcctaggtagataagtagcatggcgggttaatcattaactacaaggaacccctagtgatggagttggccactccctctctgcgcgctcgctcgctcactgaggccgggcgaccaaaggtcgcccgacgcccgggctttgcccgggcggcctcagtgagcgagcgagcgcgcag

SEQ ID NO: 1810 - DNA, 3977 bp, synthetic construct
  misc_feature 1..3977: note = source = /note="Description of Artificial Sequence: Synthetic polynucleotide"
  source 1..3977: mol_type = other DNA
ctgcgcgctcgctcgctcactgaggccgcccgggcaaagcccgggcgtcgggcgacctttggtcgcccggcctcagtgagcgagcgagcgcgcagagagggagtggccaactccatcactaggggttccttgtagttaatgattaacccgccatgctacttatctaccagggtaatggggatcctctagaactatagctagtcgacattgattattgactagttattaatagtaatcaattacggggtcattagttcatagcccatatatggagttccgcgttacataacttacggtaaatggcccgcctggctgaccgcccaacgacccccgcccattgacgtcaataatgacgtatgttcccatagtaacgccaatagggactttccattgacgtcaatgggtggagtatttacggtaaactgcccacttggcagtacatcaagtgtatcatatgccaagtacgccccctattgacgtcaatgacggtaaatggcccgcctggcattatgcccagtacatgaccttatgggactttcctacttggcagtacatctacgtattagtcatcgctattaccatgtcgaggccacgttctgcttcactctccccatctcccccccctccccacccccaattttgtatttatttattttttaattattttgtgcagcgatgggggcggggggggggggcgcgcgccaggcggggcggggcggggcgaggggcggggcggggcgaggcggagaggtgcggcggcagccaatcagagcggcgcgctccgaaagtttccttttatggcgaggcggcggcggcggcggccctataaaaagcgaagcgcgcggcgggcgggagcaagcttcgtttagtgaaccgtcagatcgcctggagacgccatccacgctgttttgacctccatagaagacaccgggaccgatccagcctccgcggattcgaatcccggccgggaacggtgcattggaacgcggattccccgtgccaagagtgacgtaagtaccgcctatagagtctataggcccacaaaaaatgctttcttcttttaatatacttttttgtttatcttatttctaatactttccctaatctctttctttcagggcaataatgatacaatgtatcatgcctctttgcaccattctaaagaataacagtgataatttctgggttaaggcaatagcaatatttctgcatataaatatttctgcatataaattgtaactgatgtaagaggtttcatattgctaatagcagctacaatccagctaccattctgcttttattttatggttgggataaggctggattattctgagtccaagctaggcccttttgctaatcatgttcatacctcttatcttcctcccacagctcctgggcaacgtgctggtctgtgtgctggcccatcactttggcaaagaattgggattcgaaccggtgccgccaccatggaattcagcagccccagcagagaggaatgccccaagcctctgagccgggtgtcaatcatggccggatctctgacaggactgctgctgcttcaggccgtgtcttgggcttctggcgctagaccttgcatccccaagagcttcggctacagcagcgtcgtgtgcgtgtgcaatgccacctactgcgacagcttcgaccctcctacctttcctgctctgggcaccttcagcagatacgagagcaccagatccggcagacggatggaactgagcatgggacccatccaggccaatcacacaggcactggcctgctgctgacactgcagcctgagcagaaattccagaaagtgaaaggcttcggcggagccatgacagatgccgccgctctgaatatcctggctctgtctccaccagctcagaacctgctgctcaagagctacttcagcgaggaaggcatcggctacaacatcatcagagtgcccatggccagctgcgacttcagcatcaggacctacacctacgccgacacacccgacgatttccagctgcacaacttcagcctgcctgaagaggacaccaagctgaagatccctctgatccacagagccctgcagctggcacaaagacccgtgtcactgctggcctctccatggacatctcccacctggctgaaaacaaatggcgccgtgaatggcaagggcagcctgaaaggccaacctggcgacatctaccaccagacctgggccagatacttcgtgaagttcctggacgcctatgccgagcacaagctgcagttttgggccgtgacagccgagaacgaaccttctgctggactgctgagcggctacccctttcagtgcctgggctttacacccgagcaccagcgggactttatcgcccgtgatctgggacccacactggccaatagcacccaccataatgtgcggctgctgatgctggacgaccagagactgcttctgccccactgggctaaagtggtgctgacagatcctgaggccgccaaatacgtgcacggaatcgccgtgcactggtatctggactttctggcccctgccaaggccacactgggagagacacacagactgttccccaacaccatgctgttcgccagcgaagcctgtgtgggcagcaagttttgggaacagagcgtgcggctcggcagctgggatagaggcatgcagtacagccacagcatcatcaccaacctgctgtaccacgtcgtcggctggaccgactggaatctggccctgaatcctgaaggcggccctaactgggtccgaaacttcgtggacagccccatcatcgtggacatcaccaaggacaccttctacaagcagcccatgttctaccacctgggacacttcagcaagttcatccccgagggctctcagcgcgttggactggtggcttcccagaagaacgatctggacgccgtggctctgatgcaccctgatggatctgctgtggtggtggtcctgaaccgcagcagcaaagatgtgcccctgaccatcaaggatcccgccgtgggattcctggaaacaatcagccctggctactccatccacacctacctgtggcgtagacagggaggggggggttcgggtggcggcggaagtgggggcggtggttctctacggaagctgcggaagcggctactgctgcggaaacttcggaaacggctactgagaaagaggcgagagggcagaggaagtcttctaacatgcggtgacgtggaggagaatcccggccctatgtacgccctcttcctcctggccagcctcctgggcgcggctctagccgtgaaagagatgcccatgcagactctggtccccgccaaagtggcctccaagaatgtcatccctgccctggaactggtggagcccattaagaagcacgaggtcccagcaaagtctgatgtttactgtgaggtgtgtgaattcctggtgaaggaggtgaccaagctgattgacaacaacaagactgagaaagaaatactcgacgcttttgacaaaatgtgctcgaagctgccgaagtccctgtcggaagagtgccaggaggtggtggacacgtacggcagctccatcctgtccatcctgctggaggaggtcagccctgagctggtgtgcagcatgctgcacctctgctctggctagtaactcgaggacggggtgaactacgcctgaggatccgatctttttccctctgccaaaaattatggggacatcatgaagccccttgagcatctgacttctggctaataaaggaaatttattttcattgcaatagtgtgttggaattttttgtgtctctcactcggcctaggtagataagtagcatggcgggttaatcattaactacaaggaacccctagtgatggagttggccactccctctctgcgcgctcgctcgctcactgaggccgggcgaccaaaggtcgcccgacgcccgggctttgcccgggcggcctcagtgagcgagcgagcgcgcag

SEQ ID NO: 1811 - DNA, 4040 bp, synthetic construct
  misc_feature 1..4040: note = source = /note="Description of Artificial Sequence: Synthetic polynucleotide"
  source 1..4040: mol_type = other DNA
ctgcgcgctcgctcgctcactgaggccgcccgggcaaagcccgggcgtcgggcgacctttggtcgcccggcctcagtgagcgagcgagcgcgcagagagggagtggccaactccatcactaggggttccttgtagttaatgattaacccgccatgctacttatctaccagggtaatggggatcctctagaactatagctagtcgacattgattattgactagttattaatagtaatcaattacggggtcattagttcatagcccatatatggagttccgcgttacataacttacggtaaatggcccgcctggctgaccgcccaacgacccccgcccattgacgtcaataatgacgtatgttcccatagtaacgccaatagggactttccattgacgtcaatgggtggagtatttacggtaaactgcccacttggcagtacatcaagtgtatcatatgccaagtacgccccctattgacgtcaatgacggtaaatggcccgcctggcattatgcccagtacatgaccttatgggactttcctacttggcagtacatctacgtattagtcatcgctattaccatgtcgaggccacgttctgcttcactctccccatctcccccccctccccacccccaattttgtatttatttattttttaattattttgtgcagcgatgggggcggggggggggggcgcgcgccaggcggggcggggcggggcgaggggcggggcggggcgaggcggagaggtgcggcggcagccaatcagagcggcgcgctccgaaagtttccttttatggcgaggcggcggcggcggcggccctataaaaagcgaagcgcgcggcgggcgggagcaagcttcgtttagtgaaccgtcagatcgcctggagacgccatccacgctgttttgacctccatagaagacaccgggaccgatccagcctccgcggattcgaatcccggccgggaacggtgcattggaacgcggattccccgtgccaagagtgacgtaagtaccgcctatagagtctataggcccacaaaaaatgctttcttcttttaatatacttttttgtttatcttatttctaatactttccctaatctctttctttcagggcaataatgatacaatgtatcatgcctctttgcaccattctaaagaataacagtgataatttctgggttaaggcaatagcaatatttctgcatataaatatttctgcatataaattgtaactgatgtaagaggtttcatattgctaatagcagctacaatccagctaccattctgcttttattttatggttgggataaggctggattattctgagtccaagctaggcccttttgctaatcatgttcatacctcttatcttcctcccacagctcctgggcaacgtgctggtctgtgtgctggcccatcactttggcaaagaattgggattcgaaccggtgccgccaccatggaattcagcagccccagcagagaggaatgccccaagcctctgagccgggtgtcaatcatggccggatctctgacaggactgctgctgcttcaggccgtgtcttgggcttctggcatgaaggagaccgctgctgcaaagttcgagagacagcatatggatagctccacaagcgccgcagctagaccttgcatccccaagagcttcggctacagcagcgtcgtgtgcgtgtgcaatgccacctactgcgacagcttcgaccctcctacctttcctgctctgggcaccttcagcagatacgagagcaccagatccggcagacggatggaactgagcatgggacccatccaggccaatcacacaggcactggcctgctgctgacactgcagcctgagcagaaattccagaaagtgaaaggcttcggcggagccatgacagatgccgccgctctgaatatcctggctctgtctccaccagctcagaacctgctgctcaagagctacttcagcgaggaaggcatcggctacaacatcatcagagtgcccatggccagctgcgacttcagcatcaggacctacacctacgccgacacacccgacgatttccagctgcacaacttcagcctgcctgaagaggacaccaagctgaagatccctctgatccacagagccctgcagctggcacaaagacccgtgtcactgctggcctctccatggacatctcccacctggctgaaaacaaatggcgccgtgaatggcaagggcagcctgaaaggccaacctggcgacatctaccaccagacctgggccagatacttcgtgaagttcctggacgcctatgccgagcacaagctgcagttttgggccgtgacagccgagaacgaaccttctgctggactgctgagcggctacccctttcagtgcctgggctttacacccgagcaccagcgggactttatcgcccgtgatctgggacccacactggccaatagcacccaccataatgtgcggctgctgatgctggacgaccagagactgcttctgccccactgggctaaagtggtgctgacagatcctgaggccgccaaatacgtgcacggaatcgccgtgcactggtatctggactttctggcccctgccaaggccacactgggagagacacacagactgttccccaacaccatgctgttcgccagcgaagcctgtgtgggcagcaagttttgggaacagagcgtgcggctcggcagctgggatagaggcatgcagtacagccacagcatcatcaccaacctgctgtaccacgtcgtcggctggaccgactggaatctggccctgaatcctgaaggcggccctaactgggtccgaaacttcgtggacagccccatcatcgtggacatcaccaaggacaccttctacaagcagcccatgttctaccacctgggacacttcagcaagttcatccccgagggctctcagcgcgttggactggtggcttcccagaagaacgatctggacgccgtggctctgatgcaccctgatggatctgctgtggtggtggtcctgaaccgcagcagcaaagatgtgcccctgaccatcaaggatcccgccgtgggattcctggaaacaatcagccctggctactccatccacacctacctgtggcgtagacagggaggggggggttcgggtggcggcggaagtgggggcggtggttctctacggaagctgcggaagcggctactgctgcggaaacttcggaaacggctactgagaaagaggcgagagggcagaggaagtcttctaacatgcggtgacgtggaggagaatcccggccctatgtacgccctcttcctcctggccagcctcctgggcgcggctctagccgtgaaagagatgcccatgcagactctggtccccgccaaagtggcctccaagaatgtcatccctgccctggaactggtggagcccattaagaagcacgaggtcccagcaaagtctgatgtttactgtgaggtgtgtgaattcctggtgaaggaggtgaccaagctgattgacaacaacaagactgagaaagaaatactcgacgcttttgacaaaatgtgctcgaagctgccgaagtccctgtcggaagagtgccaggaggtggtggacacgtacggcagctccatcctgtccatcctgctggaggaggtcagccctgagctggtgtgcagcatgctgcacctctgctctggctagtaactcgaggacggggtgaactacgcctgaggatccgatctttttccctctgccaaaaattatggggacatcatgaagccccttgagcatctgacttctggctaataaaggaaatttattttcattgcaatagtgtgttggaattttttgtgtctctcactcggcctaggtagataagtagcatggcgggttaatcattaactacaaggaacccctagtgatggagttggccactccctctctgcgcgctcgctcgctcactgaggccgggcgaccaaaggtcgcccgacgcccgggctttgcccgggcggcctcagtgagcgagcgagcgcgcag

SEQ ID NO: 1812 - DNA, 3413 bp, synthetic construct
  misc_feature 1..3413: note = source = /note="Description of Artificial Sequence: Synthetic polynucleotide"
  source 1..3413: mol_type = other DNA
ctgcgcgctcgctcgctcactgaggccgcccgggcaaagcccgggcgtcgggcgacctttggtcgcccggcctcagtgagcgagcgagcgcgcagagagggagtggccaactccatcactaggggttccttgtagttaatgattaacccgccatgctacttatctaccagggtaatggggatcctctagaactatagctagtcgacattgattattgactagttattaatagtaatcaattacggggtcattagttcatagcccatatatggagttccgcgttacataacttacggtaaatggcccgcctggctgaccgcccaacgacccccgcccattgacgtcaataatgacgtatgttcccatagtaacgccaatagggactttccattgacgtcaatgggtggagtatttacggtaaactgcccacttggcagtacatcaagtgtatcatatgccaagtacgccccctattgacgtcaatgacggtaaatggcccgcctggcattatgcccagtacatgaccttatgggactttcctacttggcagtacatctacgtattagtcatcgctattaccatgtcgaggccacgttctgcttcactctccccatctcccccccctccccacccccaattttgtatttatttattttttaattattttgtgcagcgatgggggcggggggggggggcgcgcgccaggcggggcggggcggggcgaggggcggggcggggcgaggcggagaggtgcggcggcagccaatcagagcggcgcgctccgaaagtttccttttatggcgaggcggcggcggcggcggccctataaaaagcgaagcgcgcggcgggcgggagcaagcttcgtttagtgaaccgtcagatcgcctggagacgccatccacgctgttttgacctccatagaagacaccgggaccgatccagcctccgcggattcgaatcccggccgggaacggtgcattggaacgcggattccccgtgccaagagtgacgtaagtaccgcctatagagtctataggcccacaaaaaatgctttcttcttttaatatacttttttgtttatcttatttctaatactttccctaatctctttctttcagggcaataatgatacaatgtatcatgcctctttgcaccattctaaagaataacagtgataatttctgggttaaggcaatagcaatatttctgcatataaatatttctgcatataaattgtaactgatgtaagaggtttcatattgctaatagcagctacaatccagctaccattctgcttttattttatggttgggataaggctggattattctgagtccaagctaggcccttttgctaatcatgttcatacctcttatcttcctcccacagctcctgggcaacgtgctggtctgtgtgctggcccatcactttggcaaagaattgggattcgaaccggtgccgccaccatggaattctctagcccatctagagaggaatgtcctaagcctctgtcaagagtgtccatcatggccggcagcctgacaggcctgctgctgctgcaggccgtgtcctgggccagtggagcccggccctgcatccctaagtccttcggctattctagcgtggtctgcgtgtgtaatgccacttactgcgacagcttcgaccctcctaccttccccgcccttggaacattcagcagatacgagagcaccagaagcggcagaagaatggaactgagcatgggcccaatccaggccaaccacaccggcaccggcctgctgctgacactgcaacctgagcagaagttccagaaggtgaagggatttggaggcgccatgaccgacgctgctgctctgaacatcctggccctctccccacctgctcagaacctgctgcttaaaagctacttcagcgaggaaggcatcggctataacatcatcagagtgcccatggccagctgcgacttcagcatcagaacatacacctacgccgatacacctgatgacttccaactgcacaacttcagcctgcctgaagaggacacaaagctgaaaatccccctgatccaccgggccctgcagctggcccagagacctgtgagcctgctggcctctccttggacaagccccacctggctgaagaccaatggagctgtgaacggcaagggcagcctgaagggccagcccggcgacatctaccaccaaacctgggctcgctacttcgtgaaattcctggacgcctacgctgagcataagctgcaattttgggccgttacagccgagaacgagccttctgccggcctgctgtctggatatcctttccagtgcctgggcttcacccctgagcaccagagagactttatcgccagagatctggggcctaccctggctaacagcacacaccacaacgtgcggctgctgatgctggacgatcagaggctgctgctcccccactgggccaaggtggtgctgacagatccggaggccgccaaatacgtgcacggcatcgccgtccactggtacctggatttcctggcccctgccaaggccaccctgggcgagacacatagactgtttcctaataccatgctgttcgccagcgaggcctgcgtgggcagcaagttctgggaacagagcgtgcggctgggcagctgggacagaggaatgcagtacagccacagcatcattaccaacctgctgtaccacgtggtgggctggaccgactggaacctggccctgaaccccgaaggcggccccaactgggtgcggaacttcgtggactctcctatcatcgtggatattaccaaggataccttttacaagcagcctatgttctaccacctgggccacttcagcaagttcatccctgagggctctcagcgggtgggcctggtggcctctcagaaaaacgacctggatgccgttgccctgatgcaccccgacggcagcgccgtggtggtcgtcctgaatagaagctccaaggacgtgcctctgaccatcaaggaccccgctgtgggatttctggaaaccatcagccctggctacagcatccacacctacctgtggcggcggcagtagtaactcgaggacggggtgaactacgcctgaggatccgatctttttccctctgccaaaaattatggggacatcatgaagccccttgagcatctgacttctggctaataaaggaaatttattttcattgcaatagtgtgttggaattttttgtgtctctcactcggcctaggtagataagtagcatggcgggttaatcattaactacaaggaacccctagtgatggagttggccactccctctctgcgcgctcgctcgctcactgaggccgggcgaccaaaggtcgcccgacgcccgggctttgcccgggcggcctcagtgagcgagcgagcgcgcag

SEQ ID NO: 1813 - DNA, 3375 bp, synthetic construct
  misc_feature 1..3375: note = source = /note="Description of Artificial Sequence: Synthetic polynucleotide"
  source 1..3375: mol_type = other DNA
ctgcgcgctcgctcgctcactgaggccgcccgggcaaagcccgggcgtcgggcgacctttggtcgcccggcctcagtgagcgagcgagcgcgcagagagggagtggccaactccatcactaggggttccttgtagttaatgattaacccgccatgctacttatctaccagggtaatggggatcctctagaactatagctagtcgacataacgcgtgcatgcgtgaggctccggtgcccgtcagtgggcagagcgcacatcgcccacagtccccgagaagttggggggaggggtcggcaattgaaccggtgcctagagaaggtggcgcggggtaaactgggaaagtgatgtcgtgtactggctccgcctttttcccgagggtgggggagaaccgtatataagtgcagtagtcgccgtgaacgttctttttcgcaacgggtttgccgccagaacacaggtaagtgccgtgtgtggttcccgcgggcctggcctctttacgggttatggcccttgcgtgccttgaattacttccacctggctgcagtacgtgattcttgatcccgagcttcgggttggaagtgggtgggagagttcgaggccttgcgcttaaggagccccttcgcctcgtgcttgagttgaggcctggcctgggcgctggggccgccgcgtgcgaatctggtggcaccttcgcgcctgtctcgctgctttcgataagtctctagccatttaaaatttttgatgacctgctgcgacgctttttttctggcaagatagtcttgtaaatgcgggccaagatctgcacactggtatttcggtttttggggccgcgggcggcgacggggcccgtgcgtcccagcgcacatgttcggcgaggcggggcctgcgagcgcggccaccgagaatcggacgggggtagtctcaagctggccggcctgctctggtgcctggcctcgcgccgccgtgtatcgccccgccctgggcggcaaggctggcccggtcggcaccagttgcgtgagcggaaagatggccgcttcccggccctgctgcagggagctcaaaatggaggacgcggcgctcgggagagcgggcgggtgagtcacccacacaaaggaaaagggcctttccgtcctcagccgtcgcttcatgtgactccacggagtaccgggcgccgtccaggcacctcgattagttctcgagcttttggagtacgtcgtctttaggttggggggaggggttttatgcgatggagtttccccacactgagtgggtggagactgaagttaggccagcttggcacttgatgtaattctccttggaatttgccctttttgagtttggatcttggttcattctcaagcctcagacagtggttcaaagtttttttcttccatttcaggtgtcgtgagggattcgaaccggtgccgccaccatggaattctctagcccatctagagaggaatgtcctaagcctctgtcaagagtgtccatcatggccggcagcctgacaggcctgctgctgctgcaggccgtgtcctgggccagtggagcccggccctgcatccctaagtccttcggctattctagcgtggtctgcgtgtgtaatgccacttactgcgacagcttcgaccctcctaccttccccgcccttggaacattcagcagatacgagagcaccagaagcggcagaagaatggaactgagcatgggcccaatccaggccaaccacaccggcaccggcctgctgctgacactgcaacctgagcagaagttccagaaggtgaagggatttggaggcgccatgaccgacgctgctgctctgaacatcctggccctctccccacctgctcagaacctgctgcttaaaagctacttcagcgaggaaggcatcggctataacatcatcagagtgcccatggccagctgcgacttcagcatcagaacatacacctacgccgatacacctgatgacttccaactgcacaacttcagcctgcctgaagaggacacaaagctgaaaatccccctgatccaccgggccctgcagctggcccagagacctgtgagcctgctggcctctccttggacaagccccacctggctgaagaccaatggagctgtgaacggcaagggcagcctgaagggccagcccggcgacatctaccaccaaacctgggctcgctacttcgtgaaattcctggacgcctacgctgagcataagctgcaattttgggccgttacagccgagaacgagccttctgccggcctgctgtctggatatcctttccagtgcctgggcttcacccctgagcaccagagagactttatcgccagagatctggggcctaccctggctaacagcacacaccacaacgtgcggctgctgatgctggacgatcagaggctgctgctcccccactgggccaaggtggtgctgacagatccggaggccgccaaatacgtgcacggcatcgccgtccactggtacctggatttcctggcccctgccaaggccaccctgggcgagacacatagactgtttcctaataccatgctgttcgccagcgaggcctgcgtgggcagcaagttctgggaacagagcgtgcggctgggcagctgggacagaggaatgcagtacagccacagcatcattaccaacctgctgtaccacgtggtgggctggaccgactggaacctggccctgaaccccgaaggcggccccaactgggtgcggaacttcgtggactctcctatcatcgtggatattaccaaggataccttttacaagcagcctatgttctaccacctgggccacttcagcaagttcatccctgagggctctcagcgggtgggcctggtggcctctcagaaaaacgacctggatgccgttgccctgatgcaccccgacggcagcgccgtggtggtcgtcctgaatagaagctccaaggacgtgcctctgaccatcaaggaccccgctgtgggatttctggaaaccatcagccctggctacagcatccacacctacctgtggcggcggcagtagtaactcgaggacggggtgaactacgcctgaggatccgatctttttccctctgccaaaaattatggggacatcatgaagccccttgagcatctgacttctggctaataaaggaaatttattttcattgcaatagtgtgttggaattttttgtgtctctcactcggcctaggtagataagtagcatggcgggttaatcattaactacaaggaacccctagtgatggagttggccactccctctctgcgcgctcgctcgctcactgaggccgggcgaccaaaggtcgcccgacgcccgggctttgcccgggcggcctcagtgagcgagcgagcgcgcag

SEQ ID NO: 1814 - DNA, 3360 bp, synthetic construct
  misc_feature 1..3360: note = source = /note="Description of Artificial Sequence: Synthetic polynucleotide"
  source 1..3360: mol_type = other DNA
ctgcgcgctcgctcgctcactgaggccgcccgggcaaagcccgggcgtcgggcgacctttggtcgcccggcctcagtgagcgagcgagcgcgcagagagggagtggccaactccatcactaggggttccttgtagttaatgattaacccgccatgctacttatctaccagggtaatggggatcctctagaactatagctagtcgacataacgcgtgttgacattgattattgactagttattaatagtaatcaattacggggtcattagttcatagcccatatatggagttccgcgttacataacttacggtaaatggcccgcctggctgaccgcccaacgacccccgcccattgacgtcaataatgacgtatgttcccatagtaacgccaatagggactttccattgacgtcaatgggtggagtatttacggtaaactgcccacttggcagtacatcaagtgtatcatatgccaagtacgccccctattgacgtcaatgacggtaaatggcccgcctggcattatgcccagtacatgaccttatgggactttcctacttggcagtacatctacgtattagtcatcgctattaccatggtgatgcggttttggcagtacatcaatgggcgtggatagcggtttgactcacggggatttccaagtctccaccccattgacgtcaatgggagtttgttttggcaccaaaatcaacgggactttccaaaatgtcgtaacaactccgccccattgacgcaaatgggcggtaggcgtgtacggtgggaggtctatataagcagagctcaagcttcgtttagtgaaccgtcagatcgcctggagacgccatccacgctgttttgacctccatagaagacaccgggaccgatccagcctccgcggattcgaatcccggccgggaacggtgcattggaacgcggattccccgtgccaagagtgacgtaagtaccgcctatagagtctataggcccacaaaaaatgctttcttcttttaatatacttttttgtttatcttatttctaatactttccctaatctctttctttcagggcaataatgatacaatgtatcatgcctctttgcaccattctaaagaataacagtgataatttctgggttaaggcaatagcaatatttctgcatataaatatttctgcatataaattgtaactgatgtaagaggtttcatattgctaatagcagctacaatccagctaccattctgcttttattttatggttgggataaggctggattattctgagtccaagctaggcccttttgctaatcatgttcatacctcttatcttcctcccacagctcctgggcaacgtgctggtctgtgtgctggcccatcactttggcaaagaattgggattcgaaccggtgccgccaccatggaattctctagcccatctagagaggaatgtcctaagcctctgtcaagagtgtccatcatggccggcagcctgacaggcctgctgctgctgcaggccgtgtcctgggccagtggagcccggccctgcatccctaagtccttcggctattctagcgtggtctgcgtgtgtaatgccacttactgcgacagcttcgaccctcctaccttccccgcccttggaacattcagcagatacgagagcaccagaagcggcagaagaatggaactgagcatgggcccaatccaggccaaccacaccggcaccggcctgctgctgacactgcaacctgagcagaagttccagaaggtgaagggatttggaggcgccatgaccgacgctgctgctctgaacatcctggccctctccccacctgctcagaacctgctgcttaaaagctacttcagcgaggaaggcatcggctataacatcatcagagtgcccatggccagctgcgacttcagcatcagaacatacacctacgccgatacacctgatgacttccaactgcacaacttcagcctgcctgaagaggacacaaagctgaaaatccccctgatccaccgggccctgcagctggcccagagacctgtgagcctgctggcctctccttggacaagccccacctggctgaagaccaatggagctgtgaacggcaagggcagcctgaagggccagcccggcgacatctaccaccaaacctgggctcgctacttcgtgaaattcctggacgcctacgctgagcataagctgcaattttgggccgttacagccgagaacgagccttctgccggcctgctgtctggatatcctttccagtgcctgggcttcacccctgagcaccagagagactttatcgccagagatctggggcctaccctggctaacagcacacaccacaacgtgcggctgctgatgctggacgatcagaggctgctgctcccccactgggccaaggtggtgctgacagatccggaggccgccaaatacgtgcacggcatcgccgtccactggtacctggatttcctggcccctgccaaggccaccctgggcgagacacatagactgtttcctaataccatgctgttcgccagcgaggcctgcgtgggcagcaagttctgggaacagagcgtgcggctgggcagctgggacagaggaatgcagtacagccacagcatcattaccaacctgctgtaccacgtggtgggctggaccgactggaacctggccctgaaccccgaaggcggccccaactgggtgcggaacttcgtggactctcctatcatcgtggatattaccaaggataccttttacaagcagcctatgttctaccacctgggccacttcagcaagttcatccctgagggctctcagcgggtgggcctggtggcctctcagaaaaacgacctggatgccgttgccctgatgcaccccgacggcagcgccgtggtggtcgtcctgaatagaagctccaaggacgtgcctctgaccatcaaggaccccgctgtgggatttctggaaaccatcagccctggctacagcatccacacctacctgtggcggcggcagtagtaactcgaggacggggtgaactacgcctgaggatccgatctttttccctctgccaaaaattatggggacatcatgaagccccttgagcatctgacttctggctaataaaggaaatttattttcattgcaatagtgtgttggaattttttgtgtctctcactcggcctaggtagataagtagcatggcgggttaatcattaactacaaggaacccctagtgatggagttggccactccctctctgcgcgctcgctcgctcactgaggccgggcgaccaaaggtcgcccgacgcccgggctttgcccgggcggcctcagtgagcgagcgagcgcgcag

SEQ ID NO: 1815 - DNA, 3901 bp, synthetic construct
  misc_feature 1..3901: note = source = /note="Description of Artificial Sequence: Synthetic polynucleotide"
  source 1..3901: mol_type = other DNA
ctgcgcgctcgctcgctcactgaggccgcccgggcaaagcccgggcgtcgggcgacctttggtcgcccggcctcagtgagcgagcgagcgcgcagagagggagtggccaactccatcactaggggttccttgtagttaatgattaacccgccatgctacttatctaccagggtaatggggatcctctagaactatagctagtcgacataacgcgtctagttattaatagtaatcaattacggggtcattagttcatagcccatatatggagttccgcgttacataacttacggtaaatggcccgcctggctgaccgcccaacgacccccgcccattgacgtcaataatgacgtatgttcccatagtaacgccaatagggactttccattgacgtcaatgggtggagtatttacggtaaactgcccacttggcagtacatcaagtgtatcatatgccaagtacgccccctattgacgtcaatgacggtaaatggcccgcctggcattatgcccagtacatgaccttatgggactttcctacttggcagtacatctacgtattagtcatcgctattaccatggtcgaggtgagccccacgttctgcttcactctccccatctcccccccctccccacccccaattttgtatttatttattttttaattattttgtgcagcgatgggggcggggggggggggggggcgcgcgccaggcggggcggggcggggcgaggggcggggcggggcgaggcggagaggtgcggcggcagccaatcagagcggcgcgctccgaaagtttccttttatggcgaggcggcggcggcggcggccctataaaaagcgaagcgcgcggcgggcgggagtcgctgcgcgctgccttcgccccgtgccccgctccgccgccgcctcgcgccgcccgccccggctctgactgaccgcgttactcccacaggtgagcgggcgggacggcccttctcctccgggctgtaattagcgcttggtttaatgacggcttgtttcttttctgtggctgcgtgaaagccttgaggggctccgggagggccctttgtgcggggggagcggctcggggggtgcgtgcgtgtgtgtgtgcgtggggagcgccgcgtgcggctccgcgctgcccggcggctgtgagcgctgcgggcgcggcgcggggctttgtgcgctccgcagtgtgcgcgaggggagcgcggccgggggcggtgccccgcggtgcggggggggctgcgaggggaacaaaggctgcgtgcggggtgtgtgcgtgggggggtgagcagggggtgtgggcgcgtcggtcgggctgcaaccccccctgcacccccctccccgagttgctgagcacggcccggcttcgggtgcggggctccgtacggggcgtggcgcggggctcgccgtgccgggcggggggtggcggcaggtgggggtgccgggcggggcggggccgcctcgggccggggagggctcgggggaggggcgcggcggcccccggagcgccggcggctgtcgaggcgcggcgagccgcagccattgccttttatggtaatcgtgcgagagggcgcagggacttcctttgtcccaaatctgtgcggagccgaaatctgggaggcgccgccgcaccccctctagcgggcgcggggcgaagcggtgcggcgccggcaggaaggaaatgggcggggagggccttcgtgcgtcgccgcgccgccgtccccttctccctctccagcctcggggctgtccgcggggggacggctgccttcgggggggacggggcagggcggggttcggcttctggcgtgtgaccggcggctctagagcctctgctaaccatgttcatgccttcttctttttcctacagctcctgggcaacgtgctggttattgtgctgtctcatcattttggcaaagaattcgggattcgaaccggtgccgccaccatggaattctctagcccatctagagaggaatgtcctaagcctctgtcaagagtgtccatcatggccggcagcctgacaggcctgctgctgctgcaggccgtgtcctgggccagtggagcccggccctgcatccctaagtccttcggctattctagcgtggtctgcgtgtgtaatgccacttactgcgacagcttcgaccctcctaccttccccgcccttggaacattcagcagatacgagagcaccagaagcggcagaagaatggaactgagcatgggcccaatccaggccaaccacaccggcaccggcctgctgctgacactgcaacctgagcagaagttccagaaggtgaagggatttggaggcgccatgaccgacgctgctgctctgaacatcctggccctctccccacctgctcagaacctgctgcttaaaagctacttcagcgaggaaggcatcggctataacatcatcagagtgcccatggccagctgcgacttcagcatcagaacatacacctacgccgatacacctgatgacttccaactgcacaacttcagcctgcctgaagaggacacaaagctgaaaatccccctgatccaccgggccctgcagctggcccagagacctgtgagcctgctggcctctccttggacaagccccacctggctgaagaccaatggagctgtgaacggcaagggcagcctgaagggccagcccggcgacatctaccaccaaacctgggctcgctacttcgtgaaattcctggacgcctacgctgagcataagctgcaattttgggccgttacagccgagaacgagccttctgccggcctgctgtctggatatcctttccagtgcctgggcttcacccctgagcaccagagagactttatcgccagagatctggggcctaccctggctaacagcacacaccacaacgtgcggctgctgatgctggacgatcagaggctgctgctcccccactgggccaaggtggtgctgacagatccggaggccgccaaatacgtgcacggcatcgccgtccactggtacctggatttcctggcccctgccaaggccaccctgggcgagacacatagactgtttcctaataccatgctgttcgccagcgaggcctgcgtgggcagcaagttctgggaacagagcgtgcggctgggcagctgggacagaggaatgcagtacagccacagcatcattaccaacctgctgtaccacgtggtgggctggaccgactggaacctggccctgaaccccgaaggcggccccaactgggtgcggaacttcgtggactctcctatcatcgtggatattaccaaggataccttttacaagcagcctatgttctaccacctgggccacttcagcaagttcatccctgagggctctcagcgggtgggcctggtggcctctcagaaaaacgacctggatgccgttgccctgatgcaccccgacggcagcgccgtggtggtcgtcctgaatagaagctccaaggacgtgcctctgaccatcaaggaccccgctgtgggatttctggaaaccatcagccctggctacagcatccacacctacctgtggcggcggcagtagtaactcgaggacggggtgaactacgcctgaggatccgatctttttccctctgccaaaaattatggggacatcatgaagccccttgagcatctgacttctggctaataaaggaaatttattttcattgcaatagtgtgttggaattttttgtgtctctcactcggcctaggtagataagtagcatggcgggttaatcattaactacaaggaacccctagtgatggagttggccactccctctctgcgcgctcgctcgctcactgaggccgggcgaccaaaggtcgcccgacgcccgggctttgcccgggcggcctcagtgagcgagcgagcgcgcag

SEQ ID NO: 1816 - DNA, 3413 bp, synthetic construct
  misc_feature 1..3413: note = source = /note="Description of Artificial Sequence: Synthetic polynucleotide"
  source 1..3413: mol_type = other DNA
ctgcgcgctcgctcgctcactgaggccgcccgggcaaagcccgggcgtcgggcgacctttggtcgcccggcctcagtgagcgagcgagcgcgcagagagggagtggccaactccatcactaggggttccttgtagttaatgattaacccgccatgctacttatctaccagggtaatggggatcctctagaactatagctagtcgacattgattattgactagttattaatagtaatcaattacggggtcattagttcatagcccatatatggagttccgcgttacataacttacggtaaatggcccgcctggctgaccgcccaacgacccccgcccattgacgtcaataatgacgtatgttcccatagtaacgccaatagggactttccattgacgtcaatgggtggagtatttacggtaaactgcccacttggcagtacatcaagtgtatcatatgccaagtacgccccctattgacgtcaatgacggtaaatggcccgcctggcattatgcccagtacatgaccttatgggactttcctacttggcagtacatctacgtattagtcatcgctattaccatgtcgaggccacgttctgcttcactctccccatctcccccccctccccacccccaattttgtatttatttattttttaattattttgtgcagcgatgggggcggggggggggggcgcgcgccaggcggggcggggcggggcgaggggcggggcggggcgaggcggagaggtgcggcggcagccaatcagagcggcgcgctccgaaagtttccttttatggcgaggcggcggcggcggcggccctataaaaagcgaagcgcgcggcgggcgggagcaagcttcgtttagtgaaccgtcagatcgcctggagacgccatccacgctgttttgacctccatagaagacaccgggaccgatccagcctccgcggattcgaatcccggccgggaacggtgcattggaacgcggattccccgtgccaagagtgacgtaagtaccgcctatagagtctataggcccacaaaaaatgctttcttcttttaatatacttttttgtttatcttatttctaatactttccctaatctctttctttcagggcaataatgatacaatgtatcatgcctctttgcaccattctaaagaataacagtgataatttctgggttaaggcaatagcaatatttctgcatataaatatttctgcatataaattgtaactgatgtaagaggtttcatattgctaatagcagctacaatccagctaccattctgcttttattttatggttgggataaggctggattattctgagtccaagctaggcccttttgctaatcatgttcatacctcttatcttcctcccacagctcctgggcaacgtgctggtctgtgtgctggcccatcactttggcaaagaattgggattcgaaccggtgccgccaccatggagttttcaagtccttccagagaggaatgtcccaagcctttgagtagggtaagcatcatggctggcagcctcacaggattgcttctacttcaggcagtgtcgtgggcatcaggtgcccgcccctgcatccctaaaagcttcggctacagctcggtggtgtgtgtctgcaatgccacatactgtgactcctttgaccccccgacctttcctgcccttggtaccttcagccgctatgagagtacacgcagtgggcgacggatggagctgagtatggggcccatccaggctaatcacacgggcacaggcctgctactgaccctgcagccagaacagaagttccagaaagtgaagggatttggaggggccatgacagatgctgctgctctcaacatccttgccctgtcaccccctgcccaaaatttgctacttaaatcgtacttctctgaagaaggaatcggatataacatcatccgggtacccatggccagctgtgacttctccatccgcacctacacctatgcagacacccctgatgatttccagttgcacaacttcagcctcccagaggaagataccaagctcaagatacccctgattcaccgagccctgcagttggcccagcgtcccgtttcactccttgccagcccctggacatcacccacttggctcaagaccaatggagcggtgaatgggaaggggtcactcaagggacagcccggagacatctaccaccagacctgggccagatactttgtgaagttcctggatgcctatgctgagcacaagttacagttctgggcagtgacagctgaaaatgagccttctgctgggctgttgagtggataccccttccagtgcctgggcttcacccctgaacatcagcgagacttcattgcccgtgacctaggtcctaccctcgccaacagtactcaccacaatgtccgcctactcatgctggatgaccaacgcttgctgctgccccactgggcaaaggtggtactgacagacccagaagcagctaaatatgttcatggcattgctgtacattggtacctggactttctggctccagccaaagccaccctaggggagacacaccgcctgttccccaacaccatgctctttgcctcagaggcctgtgtgggctccaagttctgggagcagagtgtgcggctaggctcctgggatcgagggatgcagtacagccacagcatcatcacgaacctcctgtaccatgtggtcggctggaccgactggaaccttgccctgaaccccgaaggaggacccaattgggtgcgtaactttgtcgacagtcccatcattgtagacatcaccaaggacacgttttacaaacagcccatgttctaccaccttggccacttcagcaagttcattcctgagggctcccagagagtggggctggttgccagtcagaagaacgacctggacgcagtggcactgatgcatcccgatggctctgctgttgtggtcgtgctaaaccgctcctctaaggatgtgcctcttaccatcaaggatcctgctgtgggcttcctggagacaatctcacctggctactccattcacacctacctgtggcgtcgccagtagtaactcgaggacggggtgaactacgcctgaggatccgatctttttccctctgccaaaaattatggggacatcatgaagccccttgagcatctgacttctggctaataaaggaaatttattttcattgcaatagtgtgttggaattttttgtgtctctcactcggcctaggtagataagtagcatggcgggttaatcattaactacaaggaacccctagtgatggagttggccactccctctctgcgcgctcgctcgctcactgaggccgggcgaccaaaggtcgcccgacgcccgggctttgcccgggcggcctcagtgagcgagcgagcgcgcag

SEQ ID NO: 1817 - DNA, 3878 bp, synthetic construct
  misc_feature 1..3878: note = source = /note="Description of Artificial Sequence: Synthetic polynucleotide"
  source 1..3878: mol_type = other DNA
ctgcgcgctcgctcgctcactgaggccgcccgggcaaagcccgggcgtcgggcgacctttggtcgcccggcctcagtgagcgagcgagcgcgcagagagggagtggccaactccatcactaggggttccttgtagttaatgattaacccgccatgctacttatctaccagggtaatggggatcctctagaactatagctagtcgacattgattattgactagttattaatagtaatcaattacggggtcattagttcatagcccatatatggagttccgcgttacataacttacggtaaatggcccgcctggctgaccgcccaacgacccccgcccattgacgtcaataatgacgtatgttcccatagtaacgccaatagggactttccattgacgtcaatgggtggagtatttacggtaaactgcccacttggcagtacatcaagtgtatcatatgccaagtacgccccctattgacgtcaatgacggtaaatggcccgcctggcattatgcccagtacatgaccttatgggactttcctacttggcagtacatctacgtattagtcatcgctattaccatgtcgaggccacgttctgcttcactctccccatctcccccccctccccacccccaattttgtatttatttattttttaattattttgtgcagcgatgggggcggggggggggggcgcgcgccaggcggggcggggcggggcgaggggcggggcggggcgaggcggagaggtgcggcggcagccaatcagagcggcgcgctccgaaagtttccttttatggcgaggcggcggcggcggcggccctataaaaagcgaagcgcgcggcgggcgggagcaagcttcgtttagtgaaccgtcagatcgcctggagacgccatccacgctgttttgacctccatagaagacaccgggaccgatccagcctccgcggattcgaatcccggccgggaacggtgcattggaacgcggattccccgtgccaagagtgacgtaagtaccgcctatagagtctataggcccacaaaaaatgctttcttcttttaatatacttttttgtttatcttatttctaatactttccctaatctctttctttcagggcaataatgatacaatgtatcatgcctctttgcaccattctaaagaataacagtgataatttctgggttaaggcaatagcaatatttctgcatataaatatttctgcatataaattgtaactgatgtaagaggtttcatattgctaatagcagctacaatccagctaccattctgcttttattttatggttgggataaggctggattattctgagtccaagctaggcccttttgctaatcatgttcatacctcttatcttcctcccacagctcctgggcaacgtgctggtctgtgtgctggcccatcactttggcaaagaattgggattcgaaccggtgccgccaccatggagttttcaagtccttccagagaggaatgtcccaagcctttgagtagggtaagcatcatggctggcagcctcacaggattgcttctacttcaggcagtgtcgtgggcatcaggtgcccgcccctgcatccctaaaagcttcggctacagctcggtggtgtgtgtctgcaatgccacatactgtgactcctttgaccccccgacctttcctgcccttggtaccttcagccgctatgagagtacacgcagtgggcgacggatggagctgagtatggggcccatccaggctaatcacacgggcacaggcctgctactgaccctgcagccagaacagaagttccagaaagtgaagggatttggaggggccatgacagatgctgctgctctcaacatccttgccctgtcaccccctgcccaaaatttgctacttaaatcgtacttctctgaagaaggaatcggatataacatcatccgggtacccatggccagctgtgacttctccatccgcacctacacctatgcagacacccctgatgatttccagttgcacaacttcagcctcccagaggaagataccaagctcaagatacccctgattcaccgagccctgcagttggcccagcgtcccgtttcactccttgccagcccctggacatcacccacttggctcaagaccaatggagcggtgaatgggaaggggtcactcaagggacagcccggagacatctaccaccagacctgggccagatactttgtgaagttcctggatgcctatgctgagcacaagttacagttctgggcagtgacagctgaaaatgagccttctgctgggctgttgagtggataccccttccagtgcctgggcttcacccctgaacatcagcgagacttcattgcccgtgacctaggtcctaccctcgccaacagtactcaccacaatgtccgcctactcatgctggatgaccaacgcttgctgctgccccactgggcaaaggtggtactgacagacccagaagcagctaaatatgttcatggcattgctgtacattggtacctggactttctggctccagccaaagccaccctaggggagacacaccgcctgttccccaacaccatgctctttgcctcagaggcctgtgtgggctccaagttctgggagcagagtgtgcggctaggctcctgggatcgagggatgcagtacagccacagcatcatcacgaacctcctgtaccatgtggtcggctggaccgactggaaccttgccctgaaccccgaaggaggacccaattgggtgcgtaactttgtcgacagtcccatcattgtagacatcaccaaggacacgttttacaaacagcccatgttctaccaccttggccacttcagcaagttcattcctgagggctcccagagagtggggctggttgccagtcagaagaacgacctggacgcagtggcactgatgcatcccgatggctctgctgttgtggtcgtgctaaaccgctcctctaaggatgtgcctcttaccatcaaggatcctgctgtgggcttcctggagacaatctcacctggctactccattcacacctacctgtggcgtcgccagagaaagaggcgagagggcagaggaagtcttctaacatgcggtgacgtggaggagaatcccggccctatgtacgccctcttcctcctggccagcctcctgggcgcggctctagccgtgaaagagatgcccatgcagactctggtccccgccaaagtggcctccaagaatgtcatccctgccctggaactggtggagcccattaagaagcacgaggtcccagcaaagtctgatgtttactgtgaggtgtgtgaattcctggtgaaggaggtgaccaagctgattgacaacaacaagactgagaaagaaatactcgacgcttttgacaaaatgtgctcgaagctgccgaagtccctgtcggaagagtgccaggaggtggtggacacgtacggcagctccatcctgtccatcctgctggaggaggtcagccctgagctggtgtgcagcatgctgcacctctgctctggctagtaactcgaggacggggtgaactacgcctgaggatccgatctttttccctctgccaaaaattatggggacatcatgaagccccttgagcatctgacttctggctaataaaggaaatttattttcattgcaatagtgtgttggaattttttgtgtctctcactcggcctaggtagataagtagcatggcgggttaatcattaactacaaggaacccctagtgatggagttggccactccctctctgcgcgctcgctcgctcactgaggccgggcgaccaaaggtcgcccgacgcccgggctttgcccgggcggcctcagtgagcgagcgagcgcgcag

SEQ ID NO: 1818 - DNA, 3512 bp, synthetic construct
  misc_feature 1..3512: note = source = /note="Description of Artificial Sequence: Synthetic polynucleotide"
  source 1..3512: mol_type = other DNA
ctgcgcgctcgctcgctcactgaggccgcccgggcaaagcccgggcgtcgggcgacctttggtcgcccggcctcagtgagcgagcgagcgcgcagagagggagtggccaactccatcactaggggttccttgtagttaatgattaacccgccatgctacttatctaccagggtaatggggatcctctagaactatagctagtcgacattgattattgactagttattaatagtaatcaattacggggtcattagttcatagcccatatatggagttccgcgttacataacttacggtaaatggcccgcctggctgaccgcccaacgacccccgcccattgacgtcaataatgacgtatgttcccatagtaacgccaatagggactttccattgacgtcaatgggtggagtatttacggtaaactgcccacttggcagtacatcaagtgtatcatatgccaagtacgccccctattgacgtcaatgacggtaaatggcccgcctggcattatgcccagtacatgaccttatgggactttcctacttggcagtacatctacgtattagtcatcgctattaccatgtcgaggccacgttctgcttcactctccccatctcccccccctccccacccccaattttgtatttatttattttttaattattttgtgcagcgatgggggcggggggggggggcgcgcgccaggcggggcggggcggggcgaggggcggggcggggcgaggcggagaggtgcggcggcagccaatcagagcggcgcgctccgaaagtttccttttatggcgaggcggcggcggcggcggccctataaaaagcgaagcgcgcggcgggcgggagcaagcttcgtttagtgaaccgtcagatcgcctggagacgccatccacgctgttttgacctccatagaagacaccgggaccgatccagcctccgcggattcgaatcccggccgggaacggtgcattggaacgcggattccccgtgccaagagtgacgtaagtaccgcctatagagtctataggcccacaaaaaatgctttcttcttttaatatacttttttgtttatcttatttctaatactttccctaatctctttctttcagggcaataatgatacaatgtatcatgcctctttgcaccattctaaagaataacagtgataatttctgggttaaggcaatagcaatatttctgcatataaatatttctgcatataaattgtaactgatgtaagaggtttcatattgctaatagcagctacaatccagctaccattctgcttttattttatggttgggataaggctggattattctgagtccaagctaggcccttttgctaatcatgttcatacctcttatcttcctcccacagctcctgggcaacgtgctggtctgtgtgctggcccatcactttggcaaagaattgggattcgaaccggtgccgccaccatggagttttcaagtccttccagagaggaatgtcccaagcctttgagtagggtaagcatcatggctggcagcctcacaggattgcttctacttcaggcagtgtcgtgggcatcaggtgcccgcccctgcatccctaaaagcttcggctacagctcggtggtgtgtgtctgcaatgccacatactgtgactcctttgaccccccgacctttcctgcccttggtaccttcagccgctatgagagtacacgcagtgggcgacggatggagctgagtatggggcccatccaggctaatcacacgggcacaggcctgctactgaccctgcagccagaacagaagttccagaaagtgaagggatttggaggggccatgacagatgctgctgctctcaacatccttgccctgtcaccccctgcccaaaatttgctacttaaatcgtacttctctgaagaaggaatcggatataacatcatccgggtacccatggccagctgtgacttctccatccgcacctacacctatgcagacacccctgatgatttccagttgcacaacttcagcctcccagaggaagataccaagctcaagatacccctgattcaccgagccctgcagttggcccagcgtcccgtttcactccttgccagcccctggacatcacccacttggctcaagaccaatggagcggtgaatgggaaggggtcactcaagggacagcccggagacatctaccaccagacctgggccagatactttgtgaagttcctggatgcctatgctgagcacaagttacagttctgggcagtgacagctgaaaatgagccttctgctgggctgttgagtggataccccttccagtgcctgggcttcacccctgaacatcagcgagacttcattgcccgtgacctaggtcctaccctcgccaacagtactcaccacaatgtccgcctactcatgctggatgaccaacgcttgctgctgccccactgggcaaaggtggtactgacagacccagaagcagctaaatatgttcatggcattgctgtacattggtacctggactttctggctccagccaaagccaccctaggggagacacaccgcctgttccccaacaccatgctctttgcctcagaggcctgtgtgggctccaagttctgggagcagagtgtgcggctaggctcctgggatcgagggatgcagtacagccacagcatcatcacgaacctcctgtaccatgtggtcggctggaccgactggaaccttgccctgaaccccgaaggaggacccaattgggtgcgtaactttgtcgacagtcccatcattgtagacatcaccaaggacacgttttacaaacagcccatgttctaccaccttggccacttcagcaagttcattcctgagggctcccagagagtggggctggttgccagtcagaagaacgacctggacgcagtggcactgatgcatcccgatggctctgctgttgtggtcgtgctaaaccgctcctctaaggatgtgcctcttaccatcaaggatcctgctgtgggcttcctggagacaatctcacctggctactccattcacacctacctgtggcgtcgccagggaggggggggttcgggtggcggcggaagtgggggcggtggttctctacggaagctgcggaagcggctactgctgcggaaacttcggaaacggctactgtagtaactcgaggacggggtgaactacgcctgaggatccgatctttttccctctgccaaaaattatggggacatcatgaagccccttgagcatctgacttctggctaataaaggaaatttattttcattgcaatagtgtgttggaattttttgtgtctctcactcggcctaggtagataagtagcatggcgggttaatcattaactacaaggaacccctagtgatggagttggccactccctctctgcgcgctcgctcgctcactgaggccgggcgaccaaaggtcgcccgacgcccgggctttgcccgggcggcctcagtgagcgagcgagcgcgcag

SEQ ID NO: 1819 - DNA, 3476 bp, synthetic construct
  misc_feature 1..3476: note = source = /note="Description of Artificial Sequence: Synthetic polynucleotide"
  source 1..3476: mol_type = other DNA
ctgcgcgctcgctcgctcactgaggccgcccgggcaaagcccgggcgtcgggcgacctttggtcgcccggcctcagtgagcgagcgagcgcgcagagagggagtggccaactccatcactaggggttccttgtagttaatgattaacccgccatgctacttatctaccagggtaatggggatcctctagaactatagctagtcgacattgattattgactagttattaatagtaatcaattacggggtcattagttcatagcccatatatggagttccgcgttacataacttacggtaaatggcccgcctggctgaccgcccaacgacccccgcccattgacgtcaataatgacgtatgttcccatagtaacgccaatagggactttccattgacgtcaatgggtggagtatttacggtaaactgcccacttggcagtacatcaagtgtatcatatgccaagtacgccccctattgacgtcaatgacggtaaatggcccgcctggcattatgcccagtacatgaccttatgggactttcctacttggcagtacatctacgtattagtcatcgctattaccatgtcgaggccacgttctgcttcactctccccatctcccccccctccccacccccaattttgtatttatttattttttaattattttgtgcagcgatgggggcggggggggggggcgcgcgccaggcggggcggggcggggcgaggggcggggcggggcgaggcggagaggtgcggcggcagccaatcagagcggcgcgctccgaaagtttccttttatggcgaggcggcggcggcggcggccctataaaaagcgaagcgcgcggcgggcgggagcaagcttcgtttagtgaaccgtcagatcgcctggagacgccatccacgctgttttgacctccatagaagacaccgggaccgatccagcctccgcggattcgaatcccggccgggaacggtgcattggaacgcggattccccgtgccaagagtgacgtaagtaccgcctatagagtctataggcccacaaaaaatgctttcttcttttaatatacttttttgtttatcttatttctaatactttccctaatctctttctttcagggcaataatgatacaatgtatcatgcctctttgcaccattctaaagaataacagtgataatttctgggttaaggcaatagcaatatttctgcatataaatatttctgcatataaattgtaactgatgtaagaggtttcatattgctaatagcagctacaatccagctaccattctgcttttattttatggttgggataaggctggattattctgagtccaagctaggcccttttgctaatcatgttcatacctcttatcttcctcccacagctcctgggcaacgtgctggtctgtgtgctggcccatcactttggcaaagaattgggattcgaaccggtgccgccaccatggagttttcaagtccttccagagaggaatgtcccaagcctttgagtagggtaagcatcatggctggcagcctcacaggattgcttctacttcaggcagtgtcgtgggcatcaggtatgaaggagaccgctgctgcaaagttcgagagacagcatatggatagctccacaagcgccgcagcccgcccctgcatccctaaaagcttcggctacagctcggtggtgtgtgtctgcaatgccacatactgtgactcctttgaccccccgacctttcctgcccttggtaccttcagccgctatgagagtacacgcagtgggcgacggatggagctgagtatggggcccatccaggctaatcacacgggcacaggcctgctactgaccctgcagccagaacagaagttccagaaagtgaagggatttggaggggccatgacagatgctgctgctctcaacatccttgccctgtcaccccctgcccaaaatttgctacttaaatcgtacttctctgaagaaggaatcggatataacatcatccgggtacccatggccagctgtgacttctccatccgcacctacacctatgcagacacccctgatgatttccagttgcacaacttcagcctcccagaggaagataccaagctcaagatacccctgattcaccgagccctgcagttggcccagcgtcccgtttcactccttgccagcccctggacatcacccacttggctcaagaccaatggagcggtgaatgggaaggggtcactcaagggacagcccggagacatctaccaccagacctgggccagatactttgtgaagttcctggatgcctatgctgagcacaagttacagttctgggcagtgacagctgaaaatgagccttctgctgggctgttgagtggataccccttccagtgcctgggcttcacccctgaacatcagcgagacttcattgcccgtgacctaggtcctaccctcgccaacagtactcaccacaatgtccgcctactcatgctggatgaccaacgcttgctgctgccccactgggcaaaggtggtactgacagacccagaagcagctaaatatgttcatggcattgctgtacattggtacctggactttctggctccagccaaagccaccctaggggagacacaccgcctgttccccaacaccatgctctttgcctcagaggcctgtgtgggctccaagttctgggagcagagtgtgcggctaggctcctgggatcgagggatgcagtacagccacagcatcatcacgaacctcctgtaccatgtggtcggctggaccgactggaaccttgccctgaaccccgaaggaggacccaattgggtgcgtaactttgtcgacagtcccatcattgtagacatcaccaaggacacgttttacaaacagcccatgttctaccaccttggccacttcagcaagttcattcctgagggctcccagagagtggggctggttgccagtcagaagaacgacctggacgcagtggcactgatgcatcccgatggctctgctgttgtggtcgtgctaaaccgctcctctaaggatgtgcctcttaccatcaaggatcctgctgtgggcttcctggagacaatctcacctggctactccattcacacctacctgtggcgtcgccagtagtaactcgaggacggggtgaactacgcctgaggatccgatctttttccctctgccaaaaattatggggacatcatgaagccccttgagcatctgacttctggctaataaaggaaatttattttcattgcaatagtgtgttggaattttttgtgtctctcactcggcctaggtagataagtagcatggcgggttaatcattaactacaaggaacccctagtgatggagttggccactccctctctgcgcgctcgctcgctcactgaggccgggcgaccaaaggtcgcccgacgcccgggctttgcccgggcggcctcagtgagcgagcgagcgcgcag

SEQ ID NO: 1820 - DNA, 3428 bp, synthetic construct
  misc_feature 1..3428: note = source = /note="Description of Artificial Sequence: Synthetic polynucleotide"
  source 1..3428: mol_type = other DNA
ctgcgcgctcgctcgctcactgaggccgcccgggcaaagcccgggcgtcgggcgacctttggtcgcccggcctcagtgagcgagcgagcgcgcagagagggagtggccaactccatcactaggggttccttgtagttaatgattaacccgccatgctacttatctaccagggtaatggggatcctctagaactatagctagtcgacattgattattgactagttattaatagtaatcaattacggggtcattagttcatagcccatatatggagttccgcgttacataacttacggtaaatggcccgcctggctgaccgcccaacgacccccgcccattgacgtcaataatgacgtatgttcccatagtaacgccaatagggactttccattgacgtcaatgggtggagtatttacggtaaactgcccacttggcagtacatcaagtgtatcatatgccaagtacgccccctattgacgtcaatgacggtaaatggcccgcctggcattatgcccagtacatgaccttatgggactttcctacttggcagtacatctacgtattagtcatcgctattaccatgtcgaggccacgttctgcttcactctccccatctcccccccctccccacccccaattttgtatttatttattttttaattattttgtgcagcgatgggggcggggggggggggcgcgcgccaggcggggcggggcggggcgaggggcggggcggggcgaggcggagaggtgcggcggcagccaatcagagcggcgcgctccgaaagtttccttttatggcgaggcggcggcggcggcggccctataaaaagcgaagcgcgcggcgggcgggagcaagcttcgtttagtgaaccgtcagatcgcctggagacgccatccacgctgttttgacctccatagaagacaccgggaccgatccagcctccgcggattcgaatcccggccgggaacggtgcattggaacgcggattccccgtgccaagagtgacgtaagtaccgcctatagagtctataggcccacaaaaaatgctttcttcttttaatatacttttttgtttatcttatttctaatactttccctaatctctttctttcagggcaataatgatacaatgtatcatgcctctttgcaccattctaaagaataacagtgataatttctgggttaaggcaatagcaatatttctgcatataaatatttctgcatataaattgtaactgatgtaagaggtttcatattgctaatagcagctacaatccagctaccattctgcttttattttatggttgggataaggctggattattctgagtccaagctaggcccttttgctaatcatgttcatacctcttatcttcctcccacagctcctgggcaacgtgctggtctgtgtgctggcccatcactttggcaaagaattgggattcgaaccggtgccgccaccatggagttttcaagtccttccagagaggaatgtcccaagcctttgagtagggtaagcatcatggctggcagcctcacaggattgcttctacttcaggcagtgtcgtgggcatcaggtgcccgcccctgcatccctaaaagcttcggctacagctcggtggtgtgtgtctgcaatgccacatactgtgactcctttgaccccccgacctttcctgcccttggtaccttcagccgctatgagagtacacgcagtgggcgacggatggagctgagtatggggcccatccaggctaatcacacgggcacaggcctgctactgaccctgcagccagaacagaagttccagaaagtgaagggatttggaggggccatgacagatgctgctgctctcaacatccttgccctgtcaccccctgcccaaaatttgctacttaaatcgtacttctctgaagaaggaatcggatataacatcatccgggtacccatggccagctgtgacttctccatccgcacctacacctatgcagacacccctgatgatttccagttgcacaacttcagcctcccagaggaagataccaagctcaagatacccctgattcaccgagccctgcagttggcccagcgtcccgtttcactccttgccagcccctggacatcacccacttggctcaagaccaatggagcggtgaatgggaaggggtcactcaagggacagcccggagacatctaccaccagacctgggccagatactttgtgaagttcctggatgcctatgctgagcacaagttacagttctgggcagtgacagctgaaaatgagccttctgctgggctgttgagtggataccccttccagtgcctgggcttcacccctgaacatcagcgagacttcattgcccgtgacctaggtcctaccctcgccaacagtactcaccacaatgtccgcctactcatgctggatgaccaacgcttgctgctgccccactgggcaaaggtggtactgacagacccagaagcagctaaatatgttcatggcattgctgtacattggtacctggactttctggctccagccaaagccaccctaggggagacacaccgcctgttccccaacaccatgctctttgcctcagaggcctgtgtgggctccaagttctgggagcagagtgtgcggctaggctcctgggatcgagggatgcagtacagccacagcatcatcacgaacctcctgtaccatgtggtcggctggaccgactggaaccttgccctgaaccccgaaggaggacccaattgggtgcgtaactttgtcgacagtcccatcattgtagacatcaccaaggacacgttttacaaacagcccatgttctaccaccttggccacttcagcaagttcattcctgagggctcccagagagtggggctggttgccagtcagaagaacgacctggacgcagtggcactgatgcatcccgatggctctgctgttgtggtcgtgctaaaccgctcctctaaggatgtgcctcttaccatcaaggatcctgctgtgggcttcctggagacaatctcacctggctactccattcacacctacctgtggcgtcgccagcagagattcttcgagtagtaactcgaggacggggtgaactacgcctgaggatccgatctttttccctctgccaaaaattatggggacatcatgaagccccttgagcatctgacttctggctaataaaggaaatttattttcattgcaatagtgtgttggaattttttgtgtctctcactcggcctaggtagataagtagcatggcgggttaatcattaactacaaggaacccctagtgatggagttggccactccctctctgcgcgctcgctcgctcactgaggccgggcgaccaaaggtcgcccgacgcccgggctttgcccgggcggcctcagtgagcgagcgagcgcgcag

SEQ ID NO: 1821 - DNA, 3375 bp, synthetic construct
  misc_feature 1..3375: note = source = /note="Description of Artificial Sequence: Synthetic polynucleotide"
  source 1..3375: mol_type = other DNA
ctgcgcgctcgctcgctcactgaggccgcccgggcaaagcccgggcgtcgggcgacctttggtcgcccggcctcagtgagcgagcgagcgcgcagagagggagtggccaactccatcactaggggttccttgtagttaatgattaacccgccatgctacttatctaccagggtaatggggatcctctagaactatagctagtcgacataacgcgtgcatgcgtgaggctccggtgcccgtcagtgggcagagcgcacatcgcccacagtccccgagaagttggggggaggggtcggcaattgaaccggtgcctagagaaggtggcgcggggtaaactgggaaagtgatgtcgtgtactggctccgcctttttcccgagggtgggggagaaccgtatataagtgcagtagtcgccgtgaacgttctttttcgcaacgggtttgccgccagaacacaggtaagtgccgtgtgtggttcccgcgggcctggcctctttacgggttatggcccttgcgtgccttgaattacttccacctggctgcagtacgtgattcttgatcccgagcttcgggttggaagtgggtgggagagttcgaggccttgcgcttaaggagccccttcgcctcgtgcttgagttgaggcctggcctgggcgctggggccgccgcgtgcgaatctggtggcaccttcgcgcctgtctcgctgctttcgataagtctctagccatttaaaatttttgatgacctgctgcgacgctttttttctggcaagatagtcttgtaaatgcgggccaagatctgcacactggtatttcggtttttggggccgcgggcggcgacggggcccgtgcgtcccagcgcacatgttcggcgaggcggggcctgcgagcgcggccaccgagaatcggacgggggtagtctcaagctggccggcctgctctggtgcctggcctcgcgccgccgtgtatcgccccgccctgggcggcaaggctggcccggtcggcaccagttgcgtgagcggaaagatggccgcttcccggccctgctgcagggagctcaaaatggaggacgcggcgctcgggagagcgggcgggtgagtcacccacacaaaggaaaagggcctttccgtcctcagccgtcgcttcatgtgactccacggagtaccgggcgccgtccaggcacctcgattagttctcgagcttttggagtacgtcgtctttaggttggggggaggggttttatgcgatggagtttccccacactgagtgggtggagactgaagttaggccagcttggcacttgatgtaattctccttggaatttgccctttttgagtttggatcttggttcattctcaagcctcagacagtggttcaaagtttttttcttccatttcaggtgtcgtgagggattcgaaccggtgccgccaccatggagttttcaagtccttccagagaggaatgtcccaagcctttgagtagggtaagcatcatggctggcagcctcacaggattgcttctacttcaggcagtgtcgtgggcatcaggtgcccgcccctgcatccctaaaagcttcggctacagctcggtggtgtgtgtctgcaatgccacatactgtgactcctttgaccccccgacctttcctgcccttggtaccttcagccgctatgagagtacacgcagtgggcgacggatggagctgagtatggggcccatccaggctaatcacacgggcacaggcctgctactgaccctgcagccagaacagaagttccagaaagtgaagggatttggaggggccatgacagatgctgctgctctcaacatccttgccctgtcaccccctgcccaaaatttgctacttaaatcgtacttctctgaagaaggaatcggatataacatcatccgggtacccatggccagctgtgacttctccatccgcacctacacctatgcagacacccctgatgatttccagttgcacaacttcagcctcccagaggaagataccaagctcaagatacccctgattcaccgagccctgcagttggcccagcgtcccgtttcactccttgccagcccctggacatcacccacttggctcaagaccaatggagcggtgaatgggaaggggtcactcaagggacagcccggagacatctaccaccagacctgggccagatactttgtgaagttcctggatgcctatgctgagcacaagttacagttctgggcagtgacagctgaaaatgagccttctgctgggctgttgagtggataccccttccagtgcctgggcttcacccctgaacatcagcgagacttcattgcccgtgacctaggtcctaccctcgccaacagtactcaccacaatgtccgcctactcatgctggatgaccaacgcttgctgctgccccactgggcaaaggtggtactgacagacccagaagcagctaaatatgttcatggcattgctgtacattggtacctggactttctggctccagccaaagccaccctaggggagacacaccgcctgttccccaacaccatgctctttgcctcagaggcctgtgtgggctccaagttctgggagcagagtgtgcggctaggctcctgggatcgagggatgcagtacagccacagcatcatcacgaacctcctgtaccatgtggtcggctggaccgactggaaccttgccctgaaccccgaaggaggacccaattgggtgcgtaactttgtcgacagtcccatcattgtagacatcaccaaggacacgttttacaaacagcccatgttctaccaccttggccacttcagcaagttcattcctgagggctcccagagagtggggctggttgccagtcagaagaacgacctggacgcagtggcactgatgcatcccgatggctctgctgttgtggtcgtgctaaaccgctcctctaaggatgtgcctcttaccatcaaggatcctgctgtgggcttcctggagacaatctcacctggctactccattcacacctacctgtggcgtcgccagtagtaactcgaggacggggtgaactacgcctgaggatccgatctttttccctctgccaaaaattatggggacatcatgaagccccttgagcatctgacttctggctaataaaggaaatttattttcattgcaatagtgtgttggaattttttgtgtctctcactcggcctaggtagataagtagcatggcgggttaatcattaactacaaggaacccctagtgatggagttggccactccctctctgcgcgctcgctcgctcactgaggccgggcgaccaaaggtcgcccgacgcccgggctttgcccgggcggcctcagtgagcgagcgagcgcgcag

SEQ ID NO: 1822 - DNA, 3878 bp, synthetic construct
  misc_feature 1..3878: note = source = /note="Description of Artificial Sequence: Synthetic polynucleotide"
  source 1..3878: mol_type = other DNA
ctgcgcgctcgctcgctcactgaggccgcccgggcaaagcccgggcgtcgggcgacctttggtcgcccggcctcagtgagcgagcgagcgcgcagagagggagtggccaactccatcactaggggttccttgtagttaatgattaacccgccatgctacttatctaccagggtaatggggatcctctagaactatagctagtcgacattgattattgactagttattaatagtaatcaattacggggtcattagttcatagcccatatatggagttccgcgttacataacttacggtaaatggcccgcctggctgaccgcccaacgacccccgcccattgacgtcaataatgacgtatgttcccatagtaacgccaatagggactttccattgacgtcaatgggtggagtatttacggtaaactgcccacttggcagtacatcaagtgtatcatatgccaagtacgccccctattgacgtcaatgacggtaaatggcccgcctggcattatgcccagtacatgaccttatgggactttcctacttggcagtacatctacgtattagtcatcgctattaccatgtcgaggccacgttctgcttcactctccccatctcccccccctccccacccccaattttgtatttatttattttttaattattttgtgcagcgatgggggcggggggggggggcgcgcgccaggcggggcggggcggggcgaggggcggggcggggcgaggcggagaggtgcggcggcagccaatcagagcggcgcgctccgaaagtttccttttatggcgaggcggcggcggcggcggccctataaaaagcgaagcgcgcggcgggcgggagcaagcttcgtttagtgaaccgtcagatcgcctggagacgccatccacgctgttttgacctccatagaagacaccgggaccgatccagcctccgcggattcgaatcccggccgggaacggtgcattggaacgcggattccccgtgccaagagtgacgtaagtaccgcctatagagtctataggcccacaaaaaatgctttcttcttttaatatacttttttgtttatcttatttctaatactttccctaatctctttctttcagggcaataatgatacaatgtatcatgcctctttgcaccattctaaagaataacagtgataatttctgggttaaggcaatagcaatatttctgcatataaatatttctgcatataaattgtaactgatgtaagaggtttcatattgctaatagcagctacaatccagctaccattctgcttttattttatggttgggataaggctggattattctgagtccaagctaggcccttttgctaatcatgttcatacctcttatcttcctcccacagctcctgggcaacgtgctggtctgtgtgctggcccatcactttggcaaagaattgggattcgaaccggtgccgccaccatggaattctctagcccatctagagaggaatgtcctaagcctctgtcaagagtgtccatcatggccggcagcctgacaggcctgctgctgctgcaggccgtgtcctgggccagtggagcccggccctgcatccctaagtccttcggctattctagcgtggtctgcgtgtgtaatgccacttactgcgacagcttcgaccctcctaccttccccgcccttggaacattcagcagatacgagagcaccagaagcggcagaagaatggaactgagcatgggcccaatccaggccaaccacaccggcaccggcctgctgctgacactgcaacctgagcagaagttccagaaggtgaagggatttggaggcgccatgaccgacgctgctgctctgaacatcctggccctctccccacctgctcagaacctgctgcttaaaagctacttcagcgaggaaggcatcggctataacatcatcagagtgcccatggccagctgcgacttcagcatcagaacatacacctacgccgatacacctgatgacttccaactgcacaacttcagcctgcctgaagaggacacaaagctgaaaatccccctgatccaccgggccctgcagctggcccagagacctgtgagcctgctggcctctccttggacaagccccacctggctgaagaccaatggagctgtgaacggcaagggcagcctgaagggccagcccggcgacatctaccaccaaacctgggctcgctacttcgtgaaattcctggacgcctacgctgagcataagctgcaattttgggccgttacagccgagaacgagccttctgccggcctgctgtctggatatcctttccagtgcctgggcttcacccctgagcaccagagagactttatcgccagagatctggggcctaccctggctaacagcacacaccacaacgtgcggctgctgatgctggacgatcagaggctgctgctcccccactgggccaaggtggtgctgacagatccggaggccgccaaatacgtgcacggcatcgccgtccactggtacctggatttcctggcccctgccaaggccaccctgggcgagacacatagactgtttcctaataccatgctgttcgccagcgaggcctgcgtgggcagcaagttctgggaacagagcgtgcggctgggcagctgggacagaggaatgcagtacagccacagcatcattaccaacctgctgtaccacgtggtgggctggaccgactggaacctggccctgaaccccgaaggcggccccaactgggtgcggaacttcgtggactctcctatcatcgtggatattaccaaggataccttttacaagcagcctatgttctaccacctgggccacttcagcaagttcatccctgagggctctcagcgggtgggcctggtggcctctcagaaaaacgacctggatgccgttgccctgatgcaccccgacggcagcgccgtggtggtcgtcctgaatagaagctccaaggacgtgcctctgaccatcaaggaccccgctgtgggatttctggaaaccatcagccctggctacagcatccacacctacctgtggcggcggcagagaaagaggcgagagggcagaggaagtcttctaacatgcggtgacgtggaggagaatcccggccctatgtacgccctcttcctcctggccagcctcctgggcgcggctctagccgtgaaagagatgcccatgcagactctggtccccgccaaagtggcctccaagaatgtcatccctgccctggaactggtggagcccattaagaagcacgaggtcccagcaaagtctgatgtttactgtgaggtgtgtgaattcctggtgaaggaggtgaccaagctgattgacaacaacaagactgagaaagaaatactcgacgcttttgacaaaatgtgctcgaagctgccgaagtccctgtcggaagagtgccaggaggtggtggacacgtacggcagctccatcctgtccatcctgctggaggaggtcagccctgagctggtgtgcagcatgctgcacctctgctctggctagtaactcgaggacggggtgaactacgcctgaggatccgatctttttccctctgccaaaaattatggggacatcatgaagccccttgagcatctgacttctggctaataaaggaaatttattttcattgcaatagtgtgttggaattttttgtgtctctcactcggcctaggtagataagtagcatggcgggttaatcattaactacaaggaacccctagtgatggagttggccactccctctctgcgcgctcgctcgctcactgaggccgggcgaccaaaggtcgcccgacgcccgggctttgcccgggcggcctcagtgagcgagcgagcgcgcag

SEQ ID NO: 1823 - DNA, 3512 bp, synthetic construct
  misc_feature 1..3512: note = source = /note="Description of Artificial Sequence: Synthetic polynucleotide"
  source 1..3512: mol_type = other DNA
ctgcgcgctcgctcgctcactgaggccgcccgggcaaagcccgggcgtcgggcgacctttggtcgcccggcctcagtgagcgagcgagcgcgcagagagggagtggccaactccatcactaggggttccttgtagttaatgattaacccgccatgctacttatctaccagggtaatggggatcctctagaactatagctagtcgacattgattattgactagttattaatagtaatcaattacggggtcattagttcatagcccatatatggagttccgcgttacataacttacggtaaatggcccgcctggctgaccgcccaacgacccccgcccattgacgtcaataatgacgtatgttcccatagtaacgccaatagggactttccattgacgtcaatgggtggagtatttacggtaaactgcccacttggcagtacatcaagtgtatcatatgccaagtacgccccctattgacgtcaatgacggtaaatggcccgcctggcattatgcccagtacatgaccttatgggactttcctacttggcagtacatctacgtattagtcatcgctattaccatgtcgaggccacgttctgcttcactctccccatctcccccccctccccacccccaattttgtatttatttattttttaattattttgtgcagcgatgggggcggggggggggggcgcgcgccaggcggggcggggcggggcgaggggcggggcggggcgaggcggagaggtgcggcggcagccaatcagagcggcgcgctccgaaagtttccttttatggcgaggcggcggcggcggcggccctataaaaagcgaagcgcgcggcgggcgggagcaagcttcgtttagtgaaccgtcagatcgcctggagacgccatccacgctgttttgacctccatagaagacaccgggaccgatccagcctccgcggattcgaatcccggccgggaacggtgcattggaacgcggattccccgtgccaagagtgacgtaagtaccgcctatagagtctataggcccacaaaaaatgctttcttcttttaatatacttttttgtttatcttatttctaatactttccctaatctctttctttcagggcaataatgatacaatgtatcatgcctctttgcaccattctaaagaataacagtgataatttctgggttaaggcaatagcaatatttctgcatataaatatttctgcatataaattgtaactgatgtaagaggtttcatattgctaatagcagctacaatccagctaccattctgcttttattttatggttgggataaggctggattattctgagtccaagctaggcccttttgctaatcatgttcatacctcttatcttcctcccacagctcctgggcaacgtgctggtctgtgtgctggcccatcactttggcaaagaattgggattcgaaccggtgccgccaccatggaattctctagcccatctagagaggaatgtcctaagcctctgtcaagagtgtccatcatggccggcagcctgacaggcctgctgctgctgcaggccgtgtcctgggccagtggagcccggccctgcatccctaagtccttcggctattctagcgtggtctgcgtgtgtaatgccacttactgcgacagcttcgaccctcctaccttccccgcccttggaacattcagcagatacgagagcaccagaagcggcagaagaatggaactgagcatgggcccaatccaggccaaccacaccggcaccggcctgctgctgacactgcaacctgagcagaagttccagaaggtgaagggatttggaggcgccatgaccgacgctgctgctctgaacatcctggccctctccccacctgctcagaacctgctgcttaaaagctacttcagcgaggaaggcatcggctataacatcatcagagtgcccatggccagctgcgacttcagcatcagaacatacacctacgccgatacacctgatgacttccaactgcacaacttcagcctgcctgaagaggacacaaagctgaaaatccccctgatccaccgggccctgcagctggcccagagacctgtgagcctgctggcctctccttggacaagccccacctggctgaagaccaatggagctgtgaacggcaagggcagcctgaagggccagcccggcgacatctaccaccaaacctgggctcgctacttcgtgaaattcctggacgcctacgctgagcataagctgcaattttgggccgttacagccgagaacgagccttctgccggcctgctgtctggatatcctttccagtgcctgggcttcacccctgagcaccagagagactttatcgccagagatctggggcctaccctggctaacagcacacaccacaacgtgcggctgctgatgctggacgatcagaggctgctgctcccccactgggccaaggtggtgctgacagatccggaggccgccaaatacgtgcacggcatcgccgtccactggtacctggatttcctggcccctgccaaggccaccctgggcgagacacatagactgtttcctaataccatgctgttcgccagcgaggcctgcgtgggcagcaagttctgggaacagagcgtgcggctgggcagctgggacagaggaatgcagtacagccacagcatcattaccaacctgctgtaccacgtggtgggctggaccgactggaacctggccctgaaccccgaaggcggccccaactgggtgcggaacttcgtggactctcctatcatcgtggatattaccaaggataccttttacaagcagcctatgttctaccacctgggccacttcagcaagttcatccctgagggctctcagcgggtgggcctggtggcctctcagaaaaacgacctggatgccgttgccctgatgcaccccgacggcagcgccgtggtggtcgtcctgaatagaagctccaaggacgtgcctctgaccatcaaggaccccgctgtgggatttctggaaaccatcagccctggctacagcatccacacctacctgtggcggcggcagggaggggggggttcgggtggcggcggaagtgggggcggtggttctctacggaagctgcggaagcggctactgctgcggaaacttcggaaacggctactgtagtaactcgaggacggggtgaactacgcctgaggatccgatctttttccctctgccaaaaattatggggacatcatgaagccccttgagcatctgacttctggctaataaaggaaatttattttcattgcaatagtgtgttggaattttttgtgtctctcactcggcctaggtagataagtagcatggcgggttaatcattaactacaaggaacccctagtgatggagttggccactccctctctgcgcgctcgctcgctcactgaggccgggcgaccaaaggtcgcccgacgcccgggctttgcccgggcggcctcagtgagcgagcgagcgcgcag

SEQ ID NO: 1824 - DNA, 3476 bp, synthetic construct
  misc_feature 1..3476: note = source = /note="Description of Artificial Sequence: Synthetic polynucleotide"
  source 1..3476: mol_type = other DNA
ctgcgcgctcgctcgctcactgaggccgcccgggcaaagcccgggcgtcgggcgacctttggtcgcccggcctcagtgagcgagcgagcgcgcagagagggagtggccaactccatcactaggggttccttgtagttaatgattaacccgccatgctacttatctaccagggtaatggggatcctctagaactatagctagtcgacattgattattgactagttattaatagtaatcaattacggggtcattagttcatagcccatatatggagttccgcgttacataacttacggtaaatggcccgcctggctgaccgcccaacgacccccgcccattgacgtcaataatgacgtatgttcccatagtaacgccaatagggactttccattgacgtcaatgggtggagtatttacggtaaactgcccacttggcagtacatcaagtgtatcatatgccaagtacgccccctattgacgtcaatgacggtaaatggcccgcctggcattatgcccagtacatgaccttatgggactttcctacttggcagtacatctacgtattagtcatcgctattaccatgtcgaggccacgttctgcttcactctccccatctcccccccctccccacccccaattttgtatttatttattttttaattattttgtgcagcgatgggggcggggggggggggcgcgcgccaggcggggcggggcggggcgaggggcggggcggggcgaggcggagaggtgcggcggcagccaatcagagcggcgcgctccgaaagtttccttttatggcgaggcggcggcggcggcggccctataaaaagcgaagcgcgcggcgggcgggagcaagcttcgtttagtgaaccgtcagatcgcctggagacgccatccacgctgttttgacctccatagaagacaccgggaccgatccagcctccgcggattcgaatcccggccgggaacggtgcattggaacgcggattccccgtgccaagagtgacgtaagtaccgcctatagagtctataggcccacaaaaaatgctttcttcttttaatatacttttttgtttatcttatttctaatactttccctaatctctttctttcagggcaataatgatacaatgtatcatgcctctttgcaccattctaaagaataacagtgataatttctgggttaaggcaatagcaatatttctgcatataaatatttctgcatataaattgtaactgatgtaagaggtttcatattgctaatagcagctacaatccagctaccattctgcttttattttatggttgggataaggctggattattctgagtccaagctaggcccttttgctaatcatgttcatacctcttatcttcctcccacagctcctgggcaacgtgctggtctgtgtgctggcccatcactttggcaaagaattgggattcgaaccggtgccgccaccatggaattctctagcccatctagagaggaatgtcctaagcctctgtcaagagtgtccatcatggccggcagcctgacaggcctgctgctgctgcaggccgtgtcctgggccagtggaatgaaggagaccgctgctgcaaagttcgagagacagcatatggatagctccacaagcgccgcagcccggccctgcatccctaagtccttcggctattctagcgtggtctgcgtgtgtaatgccacttactgcgacagcttcgaccctcctaccttccccgcccttggaacattcagcagatacgagagcaccagaagcggcagaagaatggaactgagcatgggcccaatccaggccaaccacaccggcaccggcctgctgctgacactgcaacctgagcagaagttccagaaggtgaagggatttggaggcgccatgaccgacgctgctgctctgaacatcctggccctctccccacctgctcagaacctgctgcttaaaagctacttcagcgaggaaggcatcggctataacatcatcagagtgcccatggccagctgcgacttcagcatcagaacatacacctacgccgatacacctgatgacttccaactgcacaacttcagcctgcctgaagaggacacaaagctgaaaatccccctgatccaccgggccctgcagctggcccagagacctgtgagcctgctggcctctccttggacaagccccacctggctgaagaccaatggagctgtgaacggcaagggcagcctgaagggccagcccggcgacatctaccaccaaacctgggctcgctacttcgtgaaattcctggacgcctacgctgagcataagctgcaattttgggccgttacagccgagaacgagccttctgccggcctgctgtctggatatcctttccagtgcctgggcttcacccctgagcaccagagagactttatcgccagagatctggggcctaccctggctaacagcacacaccacaacgtgcggctgctgatgctggacgatcagaggctgctgctcccccactgggccaaggtggtgctgacagatccggaggccgccaaatacgtgcacggcatcgccgtccactggtacctggatttcctggcccctgccaaggccaccctgggcgagacacatagactgtttcctaataccatgctgttcgccagcgaggcctgcgtgggcagcaagttctgggaacagagcgtgcggctgggcagctgggacagaggaatgcagtacagccacagcatcattaccaacctgctgtaccacgtggtgggctggaccgactggaacctggccctgaaccccgaaggcggccccaactgggtgcggaacttcgtggactctcctatcatcgtggatattaccaaggataccttttacaagcagcctatgttctaccacctgggccacttcagcaagttcatccctgagggctctcagcgggtgggcctggtggcctctcagaaaaacgacctggatgccgttgccctgatgcaccccgacggcagcgccgtggtggtcgtcctgaatagaagctccaaggacgtgcctctgaccatcaaggaccccgctgtgggatttctggaaaccatcagccctggctacagcatccacacctacctgtggcggcggcagtagtaactcgaggacggggtgaactacgcctgaggatccgatctttttccctctgccaaaaattatggggacatcatgaagccccttgagcatctgacttctggctaataaaggaaatttattttcattgcaatagtgtgttggaattttttgtgtctctcactcggcctaggtagataagtagcatggcgggttaatcattaactacaaggaacccctagtgatggagttggccactccctctctgcgcgctcgctcgctcactgaggccgggcgaccaaaggtcgcccgacgcccgggctttgcccgggcggcctcagtgagcgagcgagcgcgcag

SEQ ID NO: 1825 - DNA, 3428 bp, synthetic construct
  misc_feature 1..3428: note = source = /note="Description of Artificial Sequence: Synthetic polynucleotide"
  source 1..3428: mol_type = other DNA
ctgcgcgctcgctcgctcactgaggccgcccgggcaaagcccgggcgtcgggcgacctttggtcgcccggcctcagtgagcgagcgagcgcgcagagagggagtggccaactccatcactaggggttccttgtagttaatgattaacccgccatgctacttatctaccagggtaatggggatcctctagaactatagctagtcgacattgattattgactagttattaatagtaatcaattacggggtcattagttcatagcccatatatggagttccgcgttacataacttacggtaaatggcccgcctggctgaccgcccaacgacccccgcccattgacgtcaataatgacgtatgttcccatagtaacgccaatagggactttccattgacgtcaatgggtggagtatttacggtaaactgcccacttggcagtacatcaagtgtatcatatgccaagtacgccccctattgacgtcaatgacggtaaatggcccgcctggcattatgcccagtacatgaccttatgggactttcctacttggcagtacatctacgtattagtcatcgctattaccatgtcgaggccacgttctgcttcactctccccatctcccccccctccccacccccaattttgtatttatttattttttaattattttgtgcagcgatgggggcggggggggggggcgcgcgccaggcggggcggggcggggcgaggggcggggcggggcgaggcggagaggtgcggcggcagccaatcagagcggcgcgctccgaaagtttccttttatggcgaggcggcggcggcggcggccctataaaaagcgaagcgcgcggcgggcgggagcaagcttcgtttagtgaaccgtcagatcgcctggagacgccatccacgctgttttgacctccatagaagacaccgggaccgatccagcctccgcggattcgaatcccggccgggaacggtgcattggaacgcggattccccgtgccaagagtgacgtaagtaccgcctatagagtctataggcccacaaaaaatgctttcttcttttaatatacttttttgtttatcttatttctaatactttccctaatctctttctttcagggcaataatgatacaatgtatcatgcctctttgcaccattctaaagaataacagtgataatttctgggttaaggcaatagcaatatttctgcatataaatatttctgcatataaattgtaactgatgtaagaggtttcatattgctaatagcagctacaatccagctaccattctgcttttattttatggttgggataaggctggattattctgagtccaagctaggcccttttgctaatcatgttcatacctcttatcttcctcccacagctcctgggcaacgtgctggtctgtgtgctggcccatcactttggcaaagaattgggattcgaaccggtgccgccaccatggaattctctagcccatctagagaggaatgtcctaagcctctgtcaagagtgtccatcatggccggcagcctgacaggcctgctgctgctgcaggccgtgtcctgggccagtggagcccggccctgcatccctaagtccttcggctattctagcgtggtctgcgtgtgtaatgccacttactgcgacagcttcgaccctcctaccttccccgcccttggaacattcagcagatacgagagcaccagaagcggcagaagaatggaactgagcatgggcccaatccaggccaaccacaccggcaccggcctgctgctgacactgcaacctgagcagaagttccagaaggtgaagggatttggaggcgccatgaccgacgctgctgctctgaacatcctggccctctccccacctgctcagaacctgctgcttaaaagctacttcagcgaggaaggcatcggctataacatcatcagagtgcccatggccagctgcgacttcagcatcagaacatacacctacgccgatacacctgatgacttccaactgcacaacttcagcctgcctgaagaggacacaaagctgaaaatccccctgatccaccgggccctgcagctggcccagagacctgtgagcctgctggcctctccttggacaagccccacctggctgaagaccaatggagctgtgaacggcaagggcagcctgaagggccagcccggcgacatctaccaccaaacctgggctcgctacttcgtgaaattcctggacgcctacgctgagcataagctgcaattttgggccgttacagccgagaacgagccttctgccggcctgctgtctggatatcctttccagtgcctgggcttcacccctgagcaccagagagactttatcgccagagatctggggcctaccctggctaacagcacacaccacaacgtgcggctgctgatgctggacgatcagaggctgctgctcccccactgggccaaggtggtgctgacagatccggaggccgccaaatacgtgcacggcatcgccgtccactggtacctggatttcctggcccctgccaaggccaccctgggcgagacacatagactgtttcctaataccatgctgttcgccagcgaggcctgcgtgggcagcaagttctgggaacagagcgtgcggctgggcagctgggacagaggaatgcagtacagccacagcatcattaccaacctgctgtaccacgtggtgggctggaccgactggaacctggccctgaaccccgaaggcggccccaactgggtgcggaacttcgtggactctcctatcatcgtggatattaccaaggataccttttacaagcagcctatgttctaccacctgggccacttcagcaagttcatccctgagggctctcagcgggtgggcctggtggcctctcagaaaaacgacctggatgccgttgccctgatgcaccccgacggcagcgccgtggtggtcgtcctgaatagaagctccaaggacgtgcctctgaccatcaaggaccccgctgtgggatttctggaaaccatcagccctggctacagcatccacacctacctgtggcggcggcagcagagattcttcgagtagtaactcgaggacggggtgaactacgcctgaggatccgatctttttccctctgccaaaaattatggggacatcatgaagccccttgagcatctgacttctggctaataaaggaaatttattttcattgcaatagtgtgttggaattttttgtgtctctcactcggcctaggtagataagtagcatggcgggttaatcattaactacaaggaacccctagtgatggagttggccactccctctctgcgcgctcgctcgctcactgaggccgggcgaccaaaggtcgcccgacgcccgggctttgcccgggcggcctcagtgagcgagcgagcgcgcag

SEQ ID NO: 1826 - DNA, 3500 bp, synthetic construct
  misc_feature 1..3500: note = source = /note="Description of Artificial Sequence: Synthetic polynucleotide"
  source 1..3500: mol_type = other DNA
ctgcgcgctcgctcgctcactgaggccgcccgggcaaagcccgggcgtcgggcgacctttggtcgcccggcctcagtgagcgagcgagcgcgcagagagggagtggccaactccatcactaggggttccttgtagttaatgattaacccgccatgctacttatctaccagggtaatggggatcctctagaactatagctagtcgacattgattattgactagttattaatagtaatcaattacggggtcattagttcatagcccatatatggagttccgcgttacataacttacggtaaatggcccgcctggctgaccgcccaacgacccccgcccattgacgtcaataatgacgtatgttcccatagtaacgccaatagggactttccattgacgtcaatgggtggagtatttacggtaaactgcccacttggcagtacatcaagtgtatcatatgccaagtacgccccctattgacgtcaatgacggtaaatggcccgcctggcattatgcccagtacatgaccttatgggactttcctacttggcagtacatctacgtattagtcatcgctattaccatgtcgaggccacgttctgcttcactctccccatctcccccccctccccacccccaattttgtatttatttattttttaattattttgtgcagcgatgggggcggggggggggggcgcgcgccaggcggggcggggcggggcgaggggcggggcggggcgaggcggagaggtgcggcggcagccaatcagagcggcgcgctccgaaagtttccttttatggcgaggcggcggcggcggcggccctataaaaagcgaagcgcgcggcgggcgggagcaagcttcgtttagtgaaccgtcagatcgcctggagacgccatccacgctgttttgacctccatagaagacaccgggaccgatccagcctccgcggattcgaatcccggccgggaacggtgcattggaacgcggattccccgtgccaagagtgacgtaagtaccgcctatagagtctataggcccacaaaaaatgctttcttcttttaatatacttttttgtttatcttatttctaatactttccctaatctctttctttcagggcaataatgatacaatgtatcatgcctctttgcaccattctaaagaataacagtgataatttctgggttaaggcaatagcaatatttctgcatataaatatttctgcatataaattgtaactgatgtaagaggtttcatattgctaatagcagctacaatccagctaccattctgcttttattttatggttgggataaggctggattattctgagtccaagctaggcccttttgctaatcatgttcatacctcttatcttcctcccacagctcctgggcaacgtgctggtctgtgtgctggcccatcactttggcaaagaattgggattcgaaccggtgccgccaccatggagttttcaagtccttccagagaggaatgtcccaagcctttgagtagggtaagcatcatggctggcagcctcacaggattgcttctacttcaggcagtgtcgtgggcatcaggtgcccgcccctgcatccctaaaagcttcggctacagctcggtggtgtgtgtctgcaatgccacatactgtgactcctttgaccccccgacctttcctgcccttggtaccttcagccgctatgagagtacacgcagtgggcgacggatggagctgagtatggggcccatccaggctaatcacacgggcacaggcctgctactgaccctgcagccagaacagaagttccagaaagtgaagggatttggaggggccatgacagatgctgctgctctcaacatccttgccctgtcaccccctgcccaaaatttgctacttaaatcgtacttctctgaagaaggaatcggatataacatcatccgggtacccatggccagctgtgacttctccatccgcacctacacctatgcagacacccctgatgatttccagttgcacaacttcagcctcccagaggaagataccaagctcaagatacccctgattcaccgagccctgcagttggcccagcgtcccgtttcactccttgccagcccctggacatcacccacttggctcaagaccaatggagcggtgaatgggaaggggtcactcaagggacagcccggagacatctaccaccagacctgggccagatactttgtgaagttcctggatgcctatgctgagcacaagttacagttctgggcagtgacagctgaaaatgagccttctgctgggctgttgagtggataccccttccagtgcctgggcttcacccctgaacatcagcgagacttcattgcccgtgacctaggtcctaccctcgccaacagtactcaccacaatgtccgcctactcatgctggatgaccaacgcttgctgctgccccactgggcaaaggtggtactgacagacccagaagcagctaaatatgttcatggcattgctgtacattggtacctggactttctggctccagccaaagccaccctaggggagacacaccgcctgttccccaacaccatgctctttgcctcagaggcctgtgtgggctccaagttctgggagcagagtgtgcggctaggctcctgggatcgagggatgcagtacagccacagcatcatcacgaacctcctgtaccatgtggtcggctggaccgactggaaccttgccctgaaccccgaaggaggacccaattgggtgcgtaactttgtcgacagtcccatcattgtagacatcaccaaggacacgttttacaaacagcccatgttctaccaccttggccacttcagcaagttcattcctgagggctcccagagagtggggctggttgccagtcagaagaacgacctggacgcagtggcactgatgcatcccgatggctctgctgttgtggtcgtgctaaaccgctcctctaaggatgtgcctcttaccatcaaggatcctgctgtgggcttcctggagacaatctcacctggctactccattcacacctacctgtggcgtcgccagggaggggggggttcgggtggcggcggaagtgggggcggtggttcttatggcaggaaaaagcggaggcaaaggcgccgccccccccagtagtaactcgaggacggggtgaactacgcctgaggatccgatctttttccctctgccaaaaattatggggacatcatgaagccccttgagcatctgacttctggctaataaaggaaatttattttcattgcaatagtgtgttggaattttttgtgtctctcactcggcctaggtagataagtagcatggcgggttaatcattaactacaaggaacccctagtgatggagttggccactccctctctgcgcgctcgctcgctcactgaggccgggcgaccaaaggtcgcccgacgcccgggctttgcccgggcggcctcagtgagcgagcgagcgcgcag

SEQ ID NO: 1827 - DNA, 3500 bp, synthetic construct
  misc_feature 1..3500: note = source = /note="Description of Artificial Sequence: Synthetic polynucleotide"
  source 1..3500: mol_type = other DNA
ctgcgcgctcgctcgctcactgaggccgcccgggcaaagcccgggcgtcgggcgacctttggtcgcccggcctcagtgagcgagcgagcgcgcagagagggagtggccaactccatcactaggggttccttgtagttaatgattaacccgccatgctacttatctaccagggtaatggggatcctctagaactatagctagtcgacattgattattgactagttattaatagtaatcaattacggggtcattagttcatagcccatatatggagttccgcgttacataacttacggtaaatggcccgcctggctgaccgcccaacgacccccgcccattgacgtcaataatgacgtatgttcccatagtaacgccaatagggactttccattgacgtcaatgggtggagtatttacggtaaactgcccacttggcagtacatcaagtgtatcatatgccaagtacgccccctattgacgtcaatgacggtaaatggcccgcctggcattatgcccagtacatgaccttatgggactttcctacttggcagtacatctacgtattagtcatcgctattaccatgtcgaggccacgttctgcttcactctccccatctcccccccctccccacccccaattttgtatttatttattttttaattattttgtgcagcgatgggggcggggggggggggcgcgcgccaggcggggcggggcggggcgaggggcggggcggggcgaggcggagaggtgcggcggcagccaatcagagcggcgcgctccgaaagtttccttttatggcgaggcggcggcggcggcggccctataaaaagcgaagcgcgcggcgggcgggagcaagcttcgtttagtgaaccgtcagatcgcctggagacgccatccacgctgttttgacctccatagaagacaccgggaccgatccagcctccgcggattcgaatcccggccgggaacggtgcattggaacgcggattccccgtgccaagagtgacgtaagtaccgcctatagagtctataggcccacaaaaaatgctttcttcttttaatatacttttttgtttatcttatttctaatactttccctaatctctttctttcagggcaataatgatacaatgtatcatgcctctttgcaccattctaaagaataacagtgataatttctgggttaaggcaatagcaatatttctgcatataaatatttctgcatataaattgtaactgatgtaagaggtttcatattgctaatagcagctacaatccagctaccattctgcttttattttatggttgggataaggctggattattctgagtccaagctaggcccttttgctaatcatgttcatacctcttatcttcctcccacagctcctgggcaacgtgctggtctgtgtgctggcccatcactttggcaaagaattgggattcgaaccggtgccgccaccatggaattctctagcccatctagagaggaatgtcctaagcctctgtcaagagtgtccatcatggccggcagcctgacaggcctgctgctgctgcaggccgtgtcctgggccagtggagcccggccctgcatccctaagtccttcggctattctagcgtggtctgcgtgtgtaatgccacttactgcgacagcttcgaccctcctaccttccccgcccttggaacattcagcagatacgagagcaccagaagcggcagaagaatggaactgagcatgggcccaatccaggccaaccacaccggcaccggcctgctgctgacactgcaacctgagcagaagttccagaaggtgaagggatttggaggcgccatgaccgacgctgctgctctgaacatcctggccctctccccacctgctcagaacctgctgcttaaaagctacttcagcgaggaaggcatcggctataacatcatcagagtgcccatggccagctgcgacttcagcatcagaacatacacctacgccgatacacctgatgacttccaactgcacaacttcagcctgcctgaagaggacacaaagctgaaaatccccctgatccaccgggccctgcagctggcccagagacctgtgagcctgctggcctctccttggacaagccccacctggctgaagaccaatggagctgtgaacggcaagggcagcctgaagggccagcccggcgacatctaccaccaaacctgggctcgctacttcgtgaaattcctggacgcctacgctgagcataagctgcaattttgggccgttacagccgagaacgagccttctgccggcctgctgtctggatatcctttccagtgcctgggcttcacccctgagcaccagagagactttatcgccagagatctggggcctaccctggctaacagcacacaccacaacgtgcggctgctgatgctggacgatcagaggctgctgctcccccactgggccaaggtggtgctgacagatccggaggccgccaaatacgtgcacggcatcgccgtccactggtacctggatttcctggcccctgccaaggccaccctgggcgagacacatagactgtttcctaataccatgctgttcgccagcgaggcctgcgtgggcagcaagttctgggaacagagcgtgcggctgggcagctgggacagaggaatgcagtacagccacagcatcattaccaacctgctgtaccacgtggtgggctggaccgactggaacctggccctgaaccccgaaggcggccccaactgggtgcggaacttcgtggactctcctatcatcgtggatattaccaaggataccttttacaagcagcctatgttctaccacctgggccacttcagcaagttcatccctgagggctctcagcgggtgggcctggtggcctctcagaaaaacgacctggatgccgttgccctgatgcaccccgacggcagcgccgtggtggtcgtcctgaatagaagctccaaggacgtgcctctgaccatcaaggaccccgctgtgggatttctggaaaccatcagccctggctacagcatccacacctacctgtggcggcggcagggaggggggggttcgggtggcggcggaagtgggggcggtggttcttatggcaggaaaaagcggaggcaaaggcgccgccccccccagtagtaactcgaggacggggtgaactacgcctgaggatccgatctttttccctctgccaaaaattatggggacatcatgaagccccttgagcatctgacttctggctaataaaggaaatttattttcattgcaatagtgtgttggaattttttgtgtctctcactcggcctaggtagataagtagcatggcgggttaatcattaactacaaggaacccctagtgatggagttggccactccctctctgcgcgctcgctcgctcactgaggccgggcgaccaaaggtcgcccgacgcccgggctttgcccgggcggcctcagtgagcgagcgagcgcgcag

SEQ ID NO: 1828 - DNA, 3571 bp, synthetic construct
  misc_feature 1..3571: note = source = /note="Description of Artificial Sequence: Synthetic polynucleotide"
  source 1..3571: mol_type = other DNA
ctgcgcgctcgctcgctcactgaggccgcccgggcaaagcccgggcgtcgggcgacctttggtcgcccggcctcagtgagcgagcgagcgcgcagagagggagtggccaactccatcactaggggttccttgtagttaatgattaacccgccatgctacttatctaccagggtaatggggatcctctagaactatagctagtcgacattgattattgactagttattaatagtaatcaattacggggtcattagttcatagcccatatatggagttccgcgttacataacttacggtaaatggcccgcctggctgaccgcccaacgacccccgcccattgacgtcaataatgacgtatgttcccatagtaacgccaatagggactttccattgacgtcaatgggtggagtatttacggtaaactgcccacttggcagtacatcaagtgtatcatatgccaagtacgccccctattgacgtcaatgacggtaaatggcccgcctggcattatgcccagtacatgaccttatgggactttcctacttggcagtacatctacgtattagtcatcgctattaccatgtcgaggccacgttctgcttcactctccccatctcccccccctccccacccccaattttgtatttatttattttttaattattttgtgcagcgatgggggcggggggggggggcgcgcgccaggcggggcggggcggggcgaggggcggggcggggcgaggcggagaggtgcggcggcagccaatcagagcggcgcgctccgaaagtttccttttatggcgaggcggcggcggcggcggccctataaaaagcgaagcgcgcggcgggcgggagcaagcttcgtttagtgaaccgtcagatcgcctggagacgccatccacgctgttttgacctccatagaagacaccgggaccgatccagcctccgcggattcgaatcccggccgggaacggtgcattggaacgcggattccccgtgccaagagtgacgtaagtaccgcctatagagtctataggcccacaaaaaatgctttcttcttttaatatacttttttgtttatcttatttctaatactttccctaatctctttctttcagggcaataatgatacaatgtatcatgcctctttgcaccattctaaagaataacagtgataatttctgggttaaggcaatagcaatatttctgcatataaatatttctgcatataaattgtaactgatgtaagaggtttcatattgctaatagcagctacaatccagctaccattctgcttttattttatggttgggataaggctggattattctgagtccaagctaggcccttttgctaatcatgttcatacctcttatcttcctcccacagctcctgggcaacgtgctggtctgtgtgctggcccatcactttggcaaagaattgggattcgaaccggtgccgccaccatggaattctctagcccatctagagaggaatgtcctaagcctctgtcaagagtgtccatcatggccggcagcctgacaggcctgctgctgctgcaggccgtgtcctgggccagtggagcccggccctgcatccctaagtccttcggctattctagcgtggtctgcgtgtgtaatgccacttactgcgacagcttcgaccctcctaccttccccgcccttggaacattcagcagatacgagagcaccagaagcggcagaagaatggaactgagcatgggcccaatccaggccaaccacaccggcaccggcctgctgctgacactgcaacctgagcagaagttccagaaggtgaagggatttggaggcgccatgaccgacgctgctgctctgaacatcctggccctctccccacctgctcagaacctgctgcttaaaagctacttcagcgaggaaggcatcggctataacatcatcagagtgcccatggccagctgcgacttcagcatcagaacatacacctacgccgatacacctgatgacttccaactgcacaacttcagcctgcctgaagaggacacaaagctgaaaatccccctgatccaccgggccctgcagctggcccagagacctgtgagcctgctggcctctccttggacaagccccacctggctgaagaccaatggagctgtgaacggcaagggcagcctgaagggccagcccggcgacatctaccaccaaacctgggctcgctacttcgtgaaattcctggacgcctacgctgagcataagctgcaattttgggccgttacagccgagaacgagccttctgccggcctgctgtctggatatcctttccagtgcctgggcttcacccctgagcaccagagagactttatcgccagagatctggggcctaccctggctaacagcacacaccacaacgtgcggctgctgatgctggacgatcagaggctgctgctcccccactgggccaaggtggtgctgacagatccggaggccgccaaatacgtgcacggcatcgccgtccactggtacctggatttcctggcccctgccaaggccaccctgggcgagacacatagactgtttcctaataccatgctgttcgccagcgaggcctgcgtgggcagcaagttctgggaacagagcgtgcggctgggcagctgggacagaggaatgcagtacagccacagcatcattaccaacctgctgtaccacgtggtgggctggaccgactggaacctggccctgaaccccgaaggcggccccaactgggtgcggaacttcgtggactctcctatcatcgtggatattaccaaggataccttttacaagcagcctatgttctaccacctgggccacttcagcaagttcatccctgagggctctcagcgggtgggcctggtggcctctcagaaaaacgacctggatgccgttgccctgatgcaccccgacggcagcgccgtggtggtcgtcctgaatagaagctccaaggacgtgcctctgaccatcaaggaccccgctgtgggatttctggaaaccatcagccctggctacagcatccacacctacctgtggcggcggcagtagtaacctcgaggtaccaggagctcttctcctagtgaattctaccagtgccatagatagttaagtgaattctaccagtgccatagatagttaagtgaattctaccagtgccatagatagttaagtgaattctaccagtgccatactgcagtcaggtctataccatcgaggacggggtgaactacgcctgaggatccgatctttttccctctgccaaaaattatggggacatcatgaagccccttgagcatctgacttctggctaataaaggaaatttattttcattgcaatagtgtgttggaattttttgtgtctctcactcggcctaggtagataagtagcatggcgggttaatcattaactacaaggaacccctagtgatggagttggccactccctctctgcgcgctcgctcgctcactgaggccgggcgaccaaaggtcgcccgacgcccgggctttgcccgggcggcctcagtgagcgagcgagcgcgcag

SEQ ID NO: 1829 - DNA, 130 bp, synthetic construct
  misc_feature 1..130: note = source = /note="Description of Artificial Sequence: Synthetic polynucleotide"
  source 1..130: mol_type = other DNA
ctgcgcgctcgctcgctcactgaggccgcccgggcaaagcccgggcgtcgggcgacctttggtcgcccggcctcagtgagcgagcgagcgcgcagagagggagtggccaactccatcactaggggttcct

SEQ ID NO: 1830 - DNA, 130 bp, synthetic construct
  misc_feature 1..130: note = source = /note="Description of Artificial Sequence: Synthetic polynucleotide"
  source 1..130: mol_type = other DNA
aggaacccctagtgatggagttggccactccctctctgcgcgctcgctcgctcactgaggccgggcgaccaaaggtcgcccgacgcccgggctttgcccgggcggcctcagtgagcgagcgagcgcgcag

SEQ ID NO: 1831 - DNA, 380 bp, unidentified
  source 1..380: mol_type = unassigned DNA; note = Human betafrpesvirus 5
gacattgattattgactagttattaatagtaatcaattacggggtcattagttcatagcccatatatggagttccgcgttacataacttacggtaaatggcccgcctggctgaccgcccaacgacccccgcccattgacgtcaataatgacgtatgttcccatagtaacgccaatagggactttccattgacgtcaatgggtggagtatttacggtaaactgcccacttggcagtacatcaagtgtatcatatgccaagtacgccccctattgacgtcaatgacggtaaatggcccgcctggcattatgcccagtacatgaccttatgggactttcctacttggcagtacatctacgtattagtcatcgctattaccatg

SEQ ID NO: 1832 - DNA, 205 bp, unidentified
  source 1..205: mol_type = unassigned DNA; note = Human betafrpesvirus 5
gtgatgcggttttggcagtacatcaatgggcgtggatagcggtttgactcacggggatttccaagtctccaccccattgacgtcaatgggagtttgttttggcaccaaaatcaacgggactttccaaaatgtcgtaacaactccgccccattgacgcaaatgggcggtaggcgtgtacggtgggaggtctatataagcagagctc

SEQ ID NO: 1833 - DNA, 585 bp, unidentified
  source 1..585: mol_type = unassigned DNA; note = Human betafrpesvirus 5
gacattgattattgactagttattaatagtaatcaattacggggtcattagttcatagcccatatatggagttccgcgttacataacttacggtaaatggcccgcctggctgaccgcccaacgacccccgcccattgacgtcaataatgacgtatgttcccatagtaacgccaatagggactttccattgacgtcaatgggtggagtatttacggtaaactgcccacttggcagtacatcaagtgtatcatatgccaagtacgccccctattgacgtcaatgacggtaaatggcccgcctggcattatgcccagtacatgaccttatgggactttcctacttggcagtacatctacgtattagtcatcgctattaccatggtgatgcggttttggcagtacatcaatgggcgtggatagcggtttgactcacggggatttccaagtctccaccccattgacgtcaatgggagtttgttttggcaccaaaatcaacgggactttccaaaatgtcgtaacaactccgccccattgacgcaaatgggcggtaggcgtgtacggtgggaggtctatataagcagagctc

SEQ ID NO: 1834 - DNA, 260 bp, synthetic construct
  misc_feature 1..260: note = source = /note="Description of Artificial Sequence: Synthetic polynucleotide"
  source 1..260: mol_type = other DNA
ccacgttctgcttcactctccccatctcccccccctccccacccccaattttgtatttatttattttttaattattttgtgcagcgatgggggcggggggggggggcgcgcgccaggcggggcggggcggggcgaggggcggggcggggcgaggcggagaggtgcggcggcagccaatcagagcggcgcgctccgaaagtttccttttatggcgaggcggcggcggcggcggccctataaaaagcgaagcgcgcggcggg

SEQ ID NO: 1835 - DNA, 1715 bp, synthetic construct
  misc_feature 1..1715: note = source = /note="Description of Artificial Sequence: Synthetic polynucleotide"
  source 1..1715: mol_type = other DNA
ctagttattaatagtaatcaattacggggtcattagttcatagcccatatatggagttccgcgttacataacttacggtaaatggcccgcctggctgaccgcccaacgacccccgcccattgacgtcaataatgacgtatgttcccatagtaacgccaatagggactttccattgacgtcaatgggtggagtatttacggtaaactgcccacttggcagtacatcaagtgtatcatatgccaagtacgccccctattgacgtcaatgacggtaaatggcccgcctggcattatgcccagtacatgaccttatgggactttcctacttggcagtacatctacgtattagtcatcgctattaccatggtcgaggtgagccccacgttctgcttcactctccccatctcccccccctccccacccccaattttgtatttatttattttttaattattttgtgcagcgatgggggcggggggggggggggggcgcgcgccaggcggggcggggcggggcgaggggcggggcggggcgaggcggagaggtgcggcggcagccaatcagagcggcgcgctccgaaagtttccttttatggcgaggcggcggcggcggcggccctataaaaagcgaagcgcgcggcgggcgggagtcgctgcgcgctgccttcgccccgtgccccgctccgccgccgcctcgcgccgcccgccccggctctgactgaccgcgttactcccacaggtgagcgggcgggacggcccttctcctccgggctgtaattagcgcttggtttaatgacggcttgtttcttttctgtggctgcgtgaaagccttgaggggctccgggagggccctttgtgcggggggagcggctcggggggtgcgtgcgtgtgtgtgtgcgtggggagcgccgcgtgcggctccgcgctgcccggcggctgtgagcgctgcgggcgcggcgcggggctttgtgcgctccgcagtgtgcgcgaggggagcgcggccgggggcggtgccccgcggtgcggggggggctgcgaggggaacaaaggctgcgtgcggggtgtgtgcgtgggggggtgagcagggggtgtgggcgcgtcggtcgggctgcaaccccccctgcacccccctccccgagttgctgagcacggcccggcttcgggtgcggggctccgtacggggcgtggcgcggggctcgccgtgccgggcggggggtggcggcaggtgggggtgccgggcggggcggggccgcctcgggccggggagggctcgggggaggggcgcggcggcccccggagcgccggcggctgtcgaggcgcggcgagccgcagccattgccttttatggtaatcgtgcgagagggcgcagggacttcctttgtcccaaatctgtgcggagccgaaatctgggaggcgccgccgcaccccctctagcgggcgcggggcgaagcggtgcggcgccggcaggaaggaaatgggcggggagggccttcgtgcgtcgccgcgccgccgtccccttctccctctccagcctcggggctgtccgcggggggacggctgccttcgggggggacggggcagggcggggttcggcttctggcgtgtgaccggcggctctagagcctctgctaaccatgttcatgccttcttctttttcctacagctcctgggcaacgtgctggttattgtgctgtctcatcattttggcaaagaattc

SEQ ID NO: 1836 - DNA, 283 bp, synthetic construct
  misc_feature 1..283: note = source = /note="Description of Artificial Sequence: Synthetic polynucleotide"
  source 1..283: mol_type = other DNA
catggtcgaggtgagccccacgttctgcttcactctccccatctcccccccctccccacccccaattttgtatttatttattttttaattattttgtgcagcgatgggggcggggggggggggggggcgcgcgccaggcggggcggggcggggcgaggggcggggcggggcgaggcggagaggtgcggcggcagccaatcagagcggcgcgctccgaaagtttccttttatggcgaggcggcggcggcggcggccctataaaaagcgaagcgcgcggcgggcg

SEQ ID NO: 1837 - DNA, 1016 bp, synthetic construct
  misc_feature 1..1016: note = source = /note="Description of Artificial Sequence: Synthetic polynucleotide"
  source 1..1016: mol_type = other DNA
ggagtcgctgcgcgctgccttcgccccgtgccccgctccgccgccgcctcgcgccgcccgccccggctctgactgaccgcgttactcccacaggtgagcgggcgggacggcccttctcctccgggctgtaattagcgcttggtttaatgacggcttgtttcttttctgtggctgcgtgaaagccttgaggggctccgggagggccctttgtgcggggggagcggctcggggggtgcgtgcgtgtgtgtgtgcgtggggagcgccgcgtgcggctccgcgctgcccggcggctgtgagcgctgcgggcgcggcgcggggctttgtgcgctccgcagtgtgcgcgaggggagcgcggccgggggcggtgccccgcggtgcggggggggctgcgaggggaacaaaggctgcgtgcggggtgtgtgcgtgggggggtgagcagggggtgtgggcgcgtcggtcgggctgcaaccccccctgcacccccctccccgagttgctgagcacggcccggcttcgggtgcggggctccgtacggggcgtggcgcggggctcgccgtgccgggcggggggtggcggcaggtgggggtgccgggcggggcggggccgcctcgggccggggagggctcgggggaggggcgcggcggcccccggagcgccggcggctgtcgaggcgcggcgagccgcagccattgccttttatggtaatcgtgcgagagggcgcagggacttcctttgtcccaaatctgtgcggagccgaaatctgggaggcgccgccgcaccccctctagcgggcgcggggcgaagcggtgcggcgccggcaggaaggaaatgggcggggagggccttcgtgcgtcgccgcgccgccgtccccttctccctctccagcctcggggctgtccgcggggggacggctgccttcgggggggacggggcagggcggggttcggcttctggcgtgtgaccggcggctctagagcctctgctaaccatgttcatgccttcttctttttcctaca

SEQ ID NO: 1838 - DNA, 10 bp, synthetic construct
  misc_feature 1..10: note = source = /note="Description of Artificial Sequence: Synthetic oligonucleotide"
  source 1..10: mol_type = other DNA
gcatgcgtga

SEQ ID NO: 1839 - DNA, 1189 bp, synthetic construct
  misc_feature 1..1189: note = source = /note="Description of Artificial Sequence: Synthetic polynucleotide"
  source 1..1189: mol_type = other DNA
gcatgcgtgaggctccggtgcccgtcagtgggcagagcgcacatcgcccacagtccccgagaagttggggggaggggtcggcaattgaaccggtgcctagagaaggtggcgcggggtaaactgggaaagtgatgtcgtgtactggctccgcctttttcccgagggtgggggagaaccgtatataagtgcagtagtcgccgtgaacgttctttttcgcaacgggtttgccgccagaacacaggtaagtgccgtgtgtggttcccgcgggcctggcctctttacgggttatggcccttgcgtgccttgaattacttccacctggctgcagtacgtgattcttgatcccgagcttcgggttggaagtgggtgggagagttcgaggccttgcgcttaaggagccccttcgcctcgtgcttgagttgaggcctggcctgggcgctggggccgccgcgtgcgaatctggtggcaccttcgcgcctgtctcgctgctttcgataagtctctagccatttaaaatttttgatgacctgctgcgacgctttttttctggcaagatagtcttgtaaatgcgggccaagatctgcacactggtatttcggtttttggggccgcgggcggcgacggggcccgtgcgtcccagcgcacatgttcggcgaggcggggcctgcgagcgcggccaccgagaatcggacgggggtagtctcaagctggccggcctgctctggtgcctggcctcgcgccgccgtgtatcgccccgccctgggcggcaaggctggcccggtcggcaccagttgcgtgagcggaaagatggccgcttcccggccctgctgcagggagctcaaaatggaggacgcggcgctcgggagagcgggcgggtgagtcacccacacaaaggaaaagggcctttccgtcctcagccgtcgcttcatgtgactccacggagtaccgggcgccgtccaggcacctcgattagttctcgagcttttggagtacgtcgtctttaggttggggggaggggttttatgcgatggagtttccccacactgagtgggtggagactgaagttaggccagcttggcacttgatgtaattctccttggaatttgccctttttgagtttggatcttggttcattctcaagcctcagacagtggttcaaagtttttttcttccatttcaggtgtcgtga

SEQ ID NO: 1840 - DNA, 1179 bp, synthetic construct
  misc_feature 1..1179: note = source = /note="Description of Artificial Sequence: Synthetic polynucleotide"
  source 1..1179: mol_type = other DNA
ggctccggtgcccgtcagtgggcagagcgcacatcgcccacagtccccgagaagttggggggaggggtcggcaattgaaccggtgcctagagaaggtggcgcggggtaaactgggaaagtgatgtcgtgtactggctccgcctttttcccgagggtgggggagaaccgtatataagtgcagtagtcgccgtgaacgttctttttcgcaacgggtttgccgccagaacacaggtaagtgccgtgtgtggttcccgcgggcctggcctctttacgggttatggcccttgcgtgccttgaattacttccacctggctgcagtacgtgattcttgatcccgagcttcgggttggaagtgggtgggagagttcgaggccttgcgcttaaggagccccttcgcctcgtgcttgagttgaggcctggcctgggcgctggggccgccgcgtgcgaatctggtggcaccttcgcgcctgtctcgctgctttcgataagtctctagccatttaaaatttttgatgacctgctgcgacgctttttttctggcaagatagtcttgtaaatgcgggccaagatctgcacactggtatttcggtttttggggccgcgggcggcgacggggcccgtgcgtcccagcgcacatgttcggcgaggcggggcctgcgagcgcggccaccgagaatcggacgggggtagtctcaagctggccggcctgctctggtgcctggcctcgcgccgccgtgtatcgccccgccctgggcggcaaggctggcccggtcggcaccagttgcgtgagcggaaagatggccgcttcccggccctgctgcagggagctcaaaatggaggacgcggcgctcgggagagcgggcgggtgagtcacccacacaaaggaaaagggcctttccgtcctcagccgtcgcttcatgtgactccacggagtaccgggcgccgtccaggcacctcgattagttctcgagcttttggagtacgtcgtctttaggttggggggaggggttttatgcgatggagtttccccacactgagtgggtggagactgaagttaggccagcttggcacttgatgtaattctccttggaatttgccctttttgagtttggatcttggttcattctcaagcctcagacagtggttcaaagtttttttcttccatttcaggtgtcgtga

SEQ ID NO: 1841 - DNA, 939 bp, synthetic construct
  misc_feature 1..939: note = source = /note="Description of Artificial Sequence: Synthetic polynucleotide"
  source 1..939: mol_type = other DNA
gtaagtgccgtgtgtggttcccgcgggcctggcctctttacgggttatggcccttgcgtgccttgaattacttccacctggctgcagtacgtgattcttgatcccgagcttcgggttggaagtgggtgggagagttcgaggccttgcgcttaaggagccccttcgcctcgtgcttgagttgaggcctggcctgggcgctggggccgccgcgtgcgaatctggtggcaccttcgcgcctgtctcgctgctttcgataagtctctagccatttaaaatttttgatgacctgctgcgacgctttttttctggcaagatagtcttgtaaatgcgggccaagatctgcacactggtatttcggtttttggggccgcgggcggcgacggggcccgtgcgtcccagcgcacatgttcggcgaggcggggcctgcgagcgcggccaccgagaatcggacgggggtagtctcaagctggccggcctgctctggtgcctggcctcgcgccgccgtgtatcgccccgccctgggcggcaaggctggcccggtcggcaccagttgcgtgagcggaaagatggccgcttcccggccctgctgcagggagctcaaaatggaggacgcggcgctcgggagagcgggcgggtgagtcacccacacaaaggaaaagggcctttccgtcctcagccgtcgcttcatgtgactccacggagtaccgggcgccgtccaggcacctcgattagttctcgagcttttggagtacgtcgtctttaggttggggggaggggttttatgcgatggagtttccccacactgagtgggtggagactgaagttaggccagcttggcacttgatgtaattctccttggaatttgccctttttgagtttggatcttggttcattctcaagcctcagacagtggttcaaagtttttttcttccatttcag

SEQ ID NO: 1842 - DNA, 566 bp, synthetic construct
  misc_feature 1..566: note = source = /note="Description of Artificial Sequence: Synthetic polynucleotide"
  source 1..566: mol_type = other DNA
tcagatcgcctggagacgccatccacgctgttttgacctccatagaagacaccgggaccgatccagcctccgcggattcgaatcccggccgggaacggtgcattggaacgcggattccccgtgccaagagtgacgtaagtaccgcctatagagtctataggcccacaaaaaatgctttcttcttttaatatacttttttgtttatcttatttctaatactttccctaatctctttctttcagggcaataatgatacaatgtatcatgcctctttgcaccattctaaagaataacagtgataatttctgggttaaggcaatagcaatatttctgcatataaatatttctgcatataaattgtaactgatgtaagaggtttcatattgctaatagcagctacaatccagctaccattctgcttttattttatggttgggataaggctggattattctgagtccaagctaggcccttttgctaatcatgttcatacctcttatcttcctcccacagctcctgggcaacgtgctggtctgtgtgctggcccatcactttggcaaagaatt

SEQ ID NO: 1843 - protein, 5 aa, synthetic construct
  REGION 1..5: note = source = /note="Description of Artificial Sequence: Synthetic peptide"
GGGGS

SEQ ID NO: 1844 - skipped

SEQ ID NO: 1845 - protein, 15 aa, synthetic construct
  REGION 1..15: note = source = /note="Description of Artificial Sequence: Synthetic peptide"
GGGGSGGGGSGGGGS

SEQ ID NO: 1846 - DNA, 127 bp, synthetic construct
  misc_feature 1..127: note = source = /note="Description of Artificial Sequence: Synthetic polynucleotide"
  source 1..127: mol_type = other DNA
gatctttttccctctgccaaaaattatggggacatcatgaagccccttgagcatctgacttctggctaataaaggaaatttattttcattgcaatagtgtgttggaattttttgtgtctctcactcg

SEQ ID NO: 1847 - DNA, 22 bp, unidentified
  misc_feature 1..22: note = source = /note="Description of Unknown: miR183 binding site sequence"
  source 1..22: mol_type = unassigned DNA
agtgaattctaccagtgccata

SEQ ID NO: 1848 - skipped

SEQ ID NO: 1849 - DNA, 112 bp, unidentified
  misc_feature 1..112: note = source = /note="Description of Unknown: miR183 binding site sequence"
  source 1..112: mol_type = unassigned DNA
agtgaattctaccagtgccatagatagttaagtgaattctaccagtgccatagatagttaagtgaattctaccagtgccatagatagttaagtgaattctaccagtgccata

SEQ ID NO: 1850 - DNA, 117 bp, synthetic construct
  misc_feature 1..117: note = source = /note="Description of Artificial Sequence: Synthetic polynucleotide"
  source 1..117: mol_type = other DNA
atggaattctctagcccatctagagaggaatgtcctaagcctctgtcaagagtgtccatcatggccggcagcctgacaggcctgctgctgctgcaggccgtgtcctgggccagtgga

SEQ ID NO: 1851 - DNA, 117 bp, synthetic construct
  misc_feature 1..117: note = source = /note="Description of Artificial Sequence: Synthetic polynucleotide"
  source 1..117: mol_type = other DNA
atggagttttcaagtccttccagagaggaatgtcccaagcctttgagtagggtaagcatcatggctggcagcctcacaggattgcttctacttcaggcagtgtcgtgggcatcaggt

SEQ ID NO: 1852 - DNA, 117 bp, synthetic construct
  misc_feature 1..117: note = source = /note="Description of Artificial Sequence: Synthetic polynucleotide"
  source 1..117: mol_type = other DNA
atggaattcagcagccccagcagagaggaatgccccaagcctctgagccgggtgtcaatcatggccggatctctgacaggactgctgctgcttcaggccgtgtcttgggcttctggc

SEQ ID NO: 1853 - protein, 39 aa, synthetic construct
  REGION 1..39: note = source = /note="Description of Artificial Sequence: Synthetic polypeptide"
MEFSSPSREECPKPLSRVSIMAGSLTGLLLLQAVSWASG

SEQ ID NO: 1854 - protein, 4 aa, synthetic construct
  REGION 1..4: note = source = /note="Description of Artificial Sequence: Synthetic peptide"
RKRR

SEQ ID NO: 1855 - protein, 18 aa, synthetic construct
  REGION 1..18: note = source = /note="Description of Artificial Sequence: Synthetic peptide"
EGRGSLLTCGDVEENPGP

SEQ ID NO: 1856 - DNA, 48 bp, Homo sapiens
  source 1..48: mol_type = unassigned DNA
atgtacgccctcttcctcctggccagcctcctgggcgcggctctagcc

SEQ ID NO: 1857 - protein, 16 aa, Homo sapiens
MYALFLLASLLGAALA

SEQ ID NO: 1858 - DNA, 1575 bp, Homo sapiens
  source 1..1575: mol_type = unassigned DNA
atgtacgccctcttcctcctggccagcctcctgggcgcggctctagccggcccggtccttggactgaaagaatgcaccaggggctcggcagtgtggtgccagaatgtgaagacggcgtccgactgcggggcagtgaagcactgcctgcagaccgtttggaacaagccaacagtgaaatcccttccctgcgacatatgcaaagacgttgtcaccgcagctggtgatatgctgaaggacaatgccactgaggaggagatccttgtttacttggagaagacctgtgactggcttccgaaaccgaacatgtctgcttcatgcaaggagatagtggactcctacctccctgtcatcctggacatcattaaaggagaaatgagccgtcctggggaggtgtgctctgctctcaacctctgcgagtctctccagaagcacctagcagagctgaatcaccagaagcagctggagtccaataagatcccagagctggacatgactgaggtggtggcccccttcatggccaacatccctctcctcctctaccctcaggacggcccccgcagcaagccccagccaaaggataatggggacgtttgccaggactgcattcagatggtgactgacatccagactgctgtacggaccaactccacctttgtccaggccttggtggaacatgtcaaggaggagtgtgaccgcctgggccctggcatggccgacatatgcaagaactatatcagccagtattctgaaattgctatccagatgatgatgcacatgcaacccaaggagatctgtgcgctggttgggttctgtgatgaggtgaaagagatgcccatgcagactctggtccccgccaaagtggcctccaagaatgtcatccctgccctggaactggtggagcccattaagaagcacgaggtcccagcaaagtctgatgtttactgtgaggtgtgtgaattcctggtgaaggaggtgaccaagctgattgacaacaacaagactgagaaagaaatactcgacgcttttgacaaaatgtgctcgaagctgccgaagtccctgtcggaagagtgccaggaggtggtggacacgtacggcagctccatcctgtccatcctgctggaggaggtcagccctgagctggtgtgcagcatgctgcacctctgctctggcacgcggctgcctgcactgaccgttcacgtgactcagccaaaggacggtggcttctgcgaagtgtgcaagaagctggtgggttatttggatcgcaacctggagaaaaacagcaccaagcaggagatcctggctgctcttgagaaaggctgcagcttcctgccagacccttaccagaagcagtgtgatcagtttgtggcagagtacgagcccgtgctgatcgagatcctggtggaggtgatggatccttccttcgtgtgcttgaaaattggagcctgcccctcggcccataagcccttgttgggaactgagaagtgtatatggggcccaagctactggtgccagaacacagagacagcagcccagtgcaatgctgtcgagcattgcaaacgccatgtgtggaactag

SEQ ID NO: 1859 - DNA, 1527 bp, Homo sapiens
  source 1..1527: mol_type = unassigned DNA
ggcccggtccttggactgaaagaatgcaccaggggctcggcagtgtggtgccagaatgtgaagacggcgtccgactgcggggcagtgaagcactgcctgcagaccgtttggaacaagccaacagtgaaatcccttccctgcgacatatgcaaagacgttgtcaccgcagctggtgatatgctgaaggacaatgccactgaggaggagatccttgtttacttggagaagacctgtgactggcttccgaaaccgaacatgtctgcttcatgcaaggagatagtggactcctacctccctgtcatcctggacatcattaaaggagaaatgagccgtcctggggaggtgtgctctgctctcaacctctgcgagtctctccagaagcacctagcagagctgaatcaccagaagcagctggagtccaataagatcccagagctggacatgactgaggtggtggcccccttcatggccaacatccctctcctcctctaccctcaggacggcccccgcagcaagccccagccaaaggataatggggacgtttgccaggactgcattcagatggtgactgacatccagactgctgtacggaccaactccacctttgtccaggccttggtggaacatgtcaaggaggagtgtgaccgcctgggccctggcatggccgacatatgcaagaactatatcagccagtattctgaaattgctatccagatgatgatgcacatgcaacccaaggagatctgtgcgctggttgggttctgtgatgaggtgaaagagatgcccatgcagactctggtccccgccaaagtggcctccaagaatgtcatccctgccctggaactggtggagcccattaagaagcacgaggtcccagcaaagtctgatgtttactgtgaggtgtgtgaattcctggtgaaggaggtgaccaagctgattgacaacaacaagactgagaaagaaatactcgacgcttttgacaaaatgtgctcgaagctgccgaagtccctgtcggaagagtgccaggaggtggtggacacgtacggcagctccatcctgtccatcctgctggaggaggtcagccctgagctggtgtgcagcatgctgcacctctgctctggcacgcggctgcctgcactgaccgttcacgtgactcagccaaaggacggtggcttctgcgaagtgtgcaagaagctggtgggttatttggatcgcaacctggagaaaaacagcaccaagcaggagatcctggctgctcttgagaaaggctgcagcttcctgccagacccttaccagaagcagtgtgatcagtttgtggcagagtacgagcccgtgctgatcgagatcctggtggaggtgatggatccttccttcgtgtgcttgaaaattggagcctgcccctcggcccataagcccttgttgggaactgagaagtgtatatggggcccaagctactggtgccagaacacagagacagcagcccagtgcaatgctgtcgagcattgcaaacgccatgtgtggaactag

SEQ ID NO: 1860 - DNA, 19 bp, synthetic construct
  misc_feature 1..19: note = source = /note="Description of Artificial Sequence: Synthetic oligonucleotide"
  source 1..19: mol_type = other DNA
tattagatctgatggccgc

SEQ ID NO: 1861 - DNA, 20 bp, synthetic construct
  misc_feature 1..20: note = source = /note="Description of Artificial Sequence: Synthetic oligonucleotide"
  source 1..20: mol_type = other DNA
ctccatcactaggggttcct

SEQ ID NO: 1862 - DNA, 145 bp, synthetic construct
  misc_feature 1..145: note = source = /note="Description of Artificial Sequence: Synthetic polynucleotide"
  source 1..145: mol_type = other DNA
aggaacccctagtgatggagttggccactccctctctgcgcgctcgctcgctcactgaggccgggcgaccaaaggtcgcccgacgcccgggctttgcccgggcggcctcagtgagcgagcgagcgcgcagagagggagtggccaa

SEQ ID NO: 1863 - DNA, 20 bp, synthetic construct
  misc_feature 1..20: note = source = /note="Description of Artificial Sequence: Synthetic oligonucleotide"
  source 1..20: mol_type = other DNA
tattagatctgatggccgcg

SEQ ID NO: 1864 - DNA, 20 bp, synthetic construct
  misc_feature 1..20: note = source = /note="Description of Artificial Sequence: Synthetic oligonucleotide"
  source 1..20: mol_type = other DNA
tccatcactaggggttcctg

SEQ ID NO: 1865 - DNA, 23 bp, synthetic construct
  misc_feature 1..23: note = source = /note="Description of Artificial Sequence: Synthetic oligonucleotide"
  source 1..23: mol_type = other DNA
acaaacaccattgtcacactcca

SEQ ID NO: 1866 - DNA, 71 bp, unidentified
  misc_feature 1..71: note = source = /note="Description of Unknown: miR122 binding site sequence"
  source 1..71: mol_type = unassigned DNA
acaaacaccattgtcacactccacacaaacaccattgtcacactccacacaaacaccattgtcacactcca

SEQ ID NO: 1867 - DNA, 24 bp, unidentified
  misc_feature 1..24: note = source = /note="Description of Unknown: miR182 binding site sequence"
  source 1..24: mol_type = unassigned DNA
agtgtgagttctaccattgccaaa

SEQ ID NO: 1868 - DNA, 23 bp, unidentified
  misc_feature 1..23: note = source = /note="Description of Unknown: miR96 binding site sequence"
  source 1..23: mol_type = unassigned DNA
agcaaaaatgtgctagtgccaaa

SEQ ID NO: 1869 - DNA, 23 bp, unidentified
  misc_feature 1..23: note = source = /note="Description of Unknown: miR-142-3p binding site sequence"
  source 1..23: mol_type = unassigned DNA
tccataaagtaggaaacactaca

SEQ ID NO: 1870 - DNA, 3571 bp, synthetic construct
  misc_feature 1..3571: note = source = /note="Description of Artificial Sequence: Synthetic polynucleotide"
  source 1..3571: mol_type = other DNA
ctgcgcgctcgctcgctcactgaggccgcccgggcaaagcccgggcgtcgggcgacctttggtcgcccggcctcagtgagcgagcgagcgcgcagagagggagtggccaactccatcactaggggttccttgtagttaatgattaacccgccatgctacttatctaccagggtaatggggatcctctagaactatagctagtcgacattgattattgactagttattaatagtaatcaattacggggtcattagttcatagcccatatatggagttccgcgttacataacttacggtaaatggcccgcctggctgaccgcccaacgacccccgcccattgacgtcaataatgacgtatgttcccatagtaacgccaatagggactttccattgacgtcaatgggtggagtatttacggtaaactgcccacttggcagtacatcaagtgtatcatatgccaagtacgccccctattgacgtcaatgacggtaaatggcccgcctggcattatgcccagtacatgaccttatgggactttcctacttggcagtacatctacgtattagtcatcgctattaccatgtcgaggccacgttctgcttcactctccccatctcccccccctccccacccccaattttgtatttatttattttttaattattttgtgcagcgatgggggcggggggggggggcgcgcgccaggcggggcggggcggggcgaggggcggggcggggcgaggcggagaggtgcggcggcagccaatcagagcggcgcgctccgaaagtttccttttatggcgaggcggcggcggcggcggccctataaaaagcgaagcgcgcggcgggcgggagcaagcttcgtttagtgaaccgtcagatcgcctggagacgccatccacgctgttttgacctccatagaagacaccgggaccgatccagcctccgcggattcgaatcccggccgggaacggtgcattggaacgcggattccccgtgccaagagtgacgtaagtaccgcctatagagtctataggcccacaaaaaatgctttcttcttttaatatacttttttgtttatcttatttctaatactttccctaatctctttctttcagggcaataatgatacaatgtatcatgcctctttgcaccattctaaagaataacagtgataatttctgggttaaggcaatagcaatatttctgcatataaatatttctgcatataaattgtaactgatgtaagaggtttcatattgctaatagcagctacaatccagctaccattctgcttttattttatggttgggataaggctggattattctgagtccaagctaggcccttttgctaatcatgttcatacctcttatcttcctcccacagctcctgggcaacgtgctggtctgtgtgctggcccatcactttggcaaagaattgggattcgaaccggtgccgccaccatggagttttcaagtccttccagagaggaatgtcccaagcctttgagtagggtaagcatcatggctggcagcctcacaggattgcttctacttcaggcagtgtcgtgggcatcaggtgcccgcccctgcatccctaaaagcttcggctacagctcggtggtgtgtgtctgcaatgccacatactgtgactcctttgaccccccgacctttcctgcccttggtaccttcagccgctatgagagtacacgcagtgggcgacggatggagctgagtatggggcccatccaggctaatcacacgggcacaggcctgctactgaccctgcagccagaacagaagttccagaaagtgaagggatttggaggggccatgacagatgctgctgctctcaacatccttgccctgtcaccccctgcccaaaatttgctacttaaatcgtacttctctgaagaaggaatcggatataacatcatccgggtacccatggccagctgtgacttctccatccgcacctacacctatgcagacacccctgatgatttccagttgcacaacttcagcctcccagaggaagataccaagctcaagatacccctgattcaccgagccctgcagttggcccagcgtcccgtttcactccttgccagcccctggacatcacccacttggctcaagaccaatggagcggtgaatgggaaggggtcactcaagggacagcccggagacatctaccaccagacctgggccagatactttgtgaagttcctggatgcctatgctgagcacaagttacagttctgggcagtgacagctgaaaatgagccttctgctgggctgttgagtggataccccttccagtgcctgggcttcacccctgaacatcagcgagacttcattgcccgtgacctaggtcctaccctcgccaacagtactcaccacaatgtccgcctactcatgctggatgaccaacgcttgctgctgccccactgggcaaaggtggtactgacagacccagaagcagctaaatatgttcatggcattgctgtacattggtacctggactttctggctccagccaaagccaccctaggggagacacaccgcctgttccccaacaccatgctctttgcctcagaggcctgtgtgggctccaagttctgggagcagagtgtgcggctaggctcctgggatcgagggatgcagtacagccacagcatcatcacgaacctcctgtaccatgtggtcggctggaccgactggaaccttgccctgaaccccgaaggaggacccaattgggtgcgtaactttgtcgacagtcccatcattgtagacatcaccaaggacacgttttacaaacagcccatgttctaccaccttggccacttcagcaagttcattcctgagggctcccagagagtggggctggttgccagtcagaagaacgacctggacgcagtggcactgatgcatcccgatggctctgctgttgtggtcgtgctaaaccgctcctctaaggatgtgcctcttaccatcaaggatcctgctgtgggcttcctggagacaatctcacctggctactccattcacacctacctgtggcgtcgccagtagtaacctcgaggtaccaggagctcttctcctagtgaattctaccagtgccatagatagttaagtgaattctaccagtgccatagatagttaagtgaattctaccagtgccatagatagttaagtgaattctaccagtgccatactgcagtcaggtctataccatcgaggacggggtgaactacgcctgaggatccgatctttttccctctgccaaaaattatggggacatcatgaagccccttgagcatctgacttctggctaataaaggaaatttattttcattgcaatagtgtgttggaattttttgtgtctctcactcggcctaggtagataagtagcatggcgggttaatcattaactacaaggaacccctagtgatggagttggccactccctctctgcgcgctcgctcgctcactgaggccgggcgaccaaaggtcgcccgacgcccgggctttgcccgggcggcctcagtgagcgagcgagcgcgcag

SEQ ID NO: 1871 - protein, 50 aa, synthetic construct
  VARIANT 1..50: note = SITE - /note="This sequence may encompass 1-10 'Gly Gly Gly Gly Ser' repeating units"
  REGION 1..50: note = source = /note="Description of Artificial Sequence: Synthetic polypeptide"
  REGION 1..50: note = source = /note="See specification as filed for detailed description of substitutions and preferred embodiments"
GGGGSGGGGSGGGGSGGGGSGGGGSGGGGSGGGGSGGGGSGGGGSGGGGS

SEQ ID NO: 1872 - protein, 40 aa, synthetic construct
  VARIANT 1..40: note = SITE - /note="This sequence may encompass 0-8 'Gly Gly Gly Gly Ser' repeating units"
  REGION 1..40: note = source = /note="Description of Artificial Sequence: Synthetic polypeptide"
  REGION 1..40: note = source = /note="See specification as filed for detailed description of substitutions and preferred embodiments"
GGGGSGGGGSGGGGSGGGGSGGGGSGGGGSGGGGSGGGGS

SEQ ID NO: 1873 - DNA, 45 bp, synthetic construct
  misc_feature 1..45: note = source = /note="Description of Artificial Sequence: Synthetic oligonucleotide"
  source 1..45: mol_type = other DNA
ggtggtggtggtagcggcggcggcggctctggtggtggtggatcc

SEQ ID NO: 1874-2000 - skipped (127 entries)

SEQ ID NO: 2001 - DNA, 1608 bp, synthetic construct
  source 1..1608: mol_type = other DNA
atggaattctctagcccatctagagaggaatgtcctaagcctctgtcaagagtgtccatcatggctggcagcctgacaggcctgctgctgctgcaggctgtgtcctgggccagtggagccaggccctgcatccctaagtcctttggctattcttctgtggtctgtgtgtgtaatgccacttactgtgacagctttgaccctcctaccttccctgcccttggaacattcagcagatatgagagcaccagatctggcagaagaatggaactgagcatgggcccaatccaggccaaccacacaggcacaggcctcctgctgacactgcaacctgagcagaagttccagaaggtgaagggatttggaggtgccatgacagatgctgctgctctgaacatcctggccctctccccacctgctcagaacctgctgcttaaaagctacttctctgaggaaggcattggctataacatcatcagagtgcccatggccagctgtgacttcagcatcagaacatacacttatgctgatacacctgatgacttccaactgcacaacttcagtctgcctgaagaggacacaaagctgaaaatccccctgatccacagggccctccagctggcccagagacctgtgagcctgctggcctctccttggacaagccccacctggctgaagactaatggagctgtgaatggcaagggcagcctgaagggccagcctggggacatctaccaccaaacctgggctaggtactttgtcaaattcctggatgcctatgctgagcataagctgcaattttgggctgttacagctgagaatgagccttctgcaggcctgctgtctggatatcctttccagtgcctgggcttcacccctgagcaccagagagactttattgccagagatctggggccaaccctggctaacagcacacaccacaatgtgaggctgctgatgctggatgaccagaggctgctgctcccccactgggccaaggtggtgctgacagatccagaggctgccaaatatgtgcatgggattgctgtccactggtacctggatttcctggcccctgccaaggccaccctgggagaaacacatagactgtttcctaataccatgctgtttgcctctgaggcctgtgtgggcagcaagttctgggaacaatctgtgagactgggcagctgggacagaggaatgcagtacagccacagcatcattaccaacctgctgtatcatgtggtgggctggacagactggaacctggccctcaaccctgaagggggccccaactgggtgaggaactttgtggactctcctatcattgtggatattaccaaggataccttctacaagcagcctatgttctaccacctgggccacttcagcaagttcatcccagagggatctcagagggtgggccttgtggcatctcagaaaaatgacctagatgctgttgccctgatgcaccctgatgggtcagcagtggtagtggtcctgaatagaagctccaaggatgtgccactgactatcaaggacccagctgtaggatttctggaaaccatcagtcctgggtacagcatccacacttacctctggaggaggcag

SEQ ID NO: 2002 - DNA, 1491 bp, synthetic construct
  source 1..1491: mol_type = other DNA
gccaggccctgcatccctaagtcctttggctattcttctgtggtctgtgtgtgtaatgccacttactgtgacagctttgaccctcctaccttccctgcccttggaacattcagcagatatgagagcaccagatctggcagaagaatggaactgagcatgggcccaatccaggccaaccacacaggcacaggcctcctgctgacactgcaacctgagcagaagttccagaaggtgaagggatttggaggtgccatgacagatgctgctgctctgaacatcctggccctctccccacctgctcagaacctgctgcttaaaagctacttctctgaggaaggcattggctataacatcatcagagtgcccatggccagctgtgacttcagcatcagaacatacacttatgctgatacacctgatgacttccaactgcacaacttcagtctgcctgaagaggacacaaagctgaaaatccccctgatccacagggccctccagctggcccagagacctgtgagcctgctggcctctccttggacaagccccacctggctgaagactaatggagctgtgaatggcaagggcagcctgaagggccagcctggggacatctaccaccaaacctgggctaggtactttgtcaaattcctggatgcctatgctgagcataagctgcaattttgggctgttacagctgagaatgagccttctgcaggcctgctgtctggatatcctttccagtgcctgggcttcacccctgagcaccagagagactttattgccagagatctggggccaaccctggctaacagcacacaccacaatgtgaggctgctgatgctggatgaccagaggctgctgctcccccactgggccaaggtggtgctgacagatccagaggctgccaaatatgtgcatgggattgctgtccactggtacctggatttcctggcccctgccaaggccaccctgggagaaacacatagactgtttcctaataccatgctgtttgcctctgaggcctgtgtgggcagcaagttctgggaacaatctgtgagactgggcagctgggacagaggaatgcagtacagccacagcatcattaccaacctgctgtatcatgtggtgggctggacagactggaacctggccctcaaccctgaagggggccccaactgggtgaggaactttgtggactctcctatcattgtggatattaccaaggataccttctacaagcagcctatgttctaccacctgggccacttcagcaagttcatcccagagggatctcagagggtgggccttgtggcatctcagaaaaatgacctagatgctgttgccctgatgcaccctgatgggtcagcagtggtagtggtcctgaatagaagctccaaggatgtgccactgactatcaaggacccagctgtaggatttctggaaaccatcagtcctgggtacagcatccacacttacctctggaggaggcag

SEQ ID NO: 2003-2004 - skipped (2 entries)

SEQ ID NO: 2005 - DNA, 117 bp, synthetic construct
  source 1..117: mol_type = other DNA
atggaattctctagcccatctagagaggaatgtcctaagcctctgtcaagagtgtccatcatggctggcagcctgacaggcctgctgctgctgcaggctgtgtcctgggccagtgga

SEQ ID NO: 2006 - DNA, 3413 bp, synthetic construct
  source 1..3413: mol_type = other DNA
ctgcgcgctcgctcgctcactgaggccgcccgggcaaagcccgggcgtcgggcgacctttggtcgcccggcctcagtgagcgagcgagcgcgcagagagggagtggccaactccatcactaggggttccttgtagttaatgattaacccgccatgctacttatctaccagggtaatggggatcctctagaactatagctagtcgacattgattattgactagttattaatagtaatcaattacggggtcattagttcatagcccatatatggagttccgcgttacataacttacggtaaatggcccgcctggctgaccgcccaacgacccccgcccattgacgtcaataatgacgtatgttcccatagtaacgccaatagggactttccattgacgtcaatgggtggagtatttacggtaaactgcccacttggcagtacatcaagtgtatcatatgccaagtacgccccctattgacgtcaatgacggtaaatggcccgcctggcattatgcccagtacatgaccttatgggactttcctacttggcagtacatctacgtattagtcatcgctattaccatgtcgaggccacgttctgcttcactctccccatctcccccccctccccacccccaattttgtatttatttattttttaattattttgtgcagcgatgggggcggggggggggggcgcgcgccaggcggggcggggcggggcgaggggcggggcggggcgaggcggagaggtgcggcggcagccaatcagagcggcgcgctccgaaagtttccttttatggcgaggcggcggcggcggcggccctataaaaagcgaagcgcgcggcgggcgggagcaagcttcgtttagtgaaccgtcagatcgcctggagacgccatccacgctgttttgacctccatagaagacaccgggaccgatccagcctccgcggattcgaatcccggccgggaacggtgcattggaacgcggattccccgtgccaagagtgacgtaagtaccgcctatagagtctataggcccacaaaaaatgctttcttcttttaatatacttttttgtttatcttatttctaatactttccctaatctctttctttcagggcaataatgatacaatgtatcatgcctctttgcaccattctaaagaataacagtgataatttctgggttaaggcaatagcaatatttctgcatataaatatttctgcatataaattgtaactgatgtaagaggtttcatattgctaatagcagctacaatccagctaccattctgcttttattttatggttgggataaggctggattattctgagtccaagctaggcccttttgctaatcatgttcatacctcttatcttcctcccacagctcctgggcaacgtgctggtctgtgtgctggcccatcactttggcaaagaattgggattcgaaccggtgccgccaccatggaattctctagcccatctagagaggaatgtcctaagcctctgtcaagagtgtccatcatggctggcagcctgacaggcctgctgctgctgcaggctgtgtcctgggccagtggagccaggccctgcatccctaagtcctttggctattcttctgtggtctgtgtgtgtaatgccacttactgtgacagctttgaccctcctaccttccctgcccttggaacattcagcagatatgagagcaccagatctggcagaagaatggaactgagcatgggcccaatccaggccaaccacacaggcacaggcctcctgctgacactgcaacctgagcagaagttccagaaggtgaagggatttggaggtgccatgacagatgctgctgctctgaacatcctggccctctccccacctgctcagaacctgctgcttaaaagctacttctctgaggaaggcattggctataacatcatcagagtgcccatggccagctgtgacttcagcatcagaacatacacttatgctgatacacctgatgacttccaactgcacaacttcagtctgcctgaagaggacacaaagctgaaaatccccctgatccacagggccctccagctggcccagagacctgtgagcctgctggcctctccttggacaagccccacctggctgaagactaatggagctgtgaatggcaagggcagcctgaagggccagcctggggacatctaccaccaaacctgggctaggtactttgtcaaattcctggatgcctatgctgagcataagctgcaattttgggctgttacagctgagaatgagccttctgcaggcctgctgtctggatatcctttccagtgcctgggcttcacccctgagcaccagagagactttattgccagagatctggggccaaccctggctaacagcacacaccacaatgtgaggctgctgatgctggatgaccagaggctgctgctcccccactgggccaaggtggtgctgacagatccagaggctgccaaatatgtgcatgggattgctgtccactggtacctggatttcctggcccctgccaaggccaccctgggagaaacacatagactgtttcctaataccatgctgtttgcctctgaggcctgtgtgggcagcaagttctgggaacaatctgtgagactgggcagctgggacagaggaatgcagtacagccacagcatcattaccaacctgctgtatcatgtggtgggctggacagactggaacctggccctcaaccctgaagggggccccaactgggtgaggaactttgtggactctcctatcattgtggatattaccaaggataccttctacaagcagcctatgttctaccacctgggccacttcagcaagttcatcccagagggatctcagagggtgggccttgtggcatctcagaaaaatgacctagatgctgttgccctgatgcaccctgatgggtcagcagtggtagtggtcctgaatagaagctccaaggatgtgccactgactatcaaggacccagctgtaggatttctggaaaccatcagtcctgggtacagcatccacacttacctctggaggaggcagtagtaactcgaggacggggtgaactacgcctgaggatccgatctttttccctctgccaaaaattatggggacatcatgaagccccttgagcatctgacttctggctaataaaggaaatttattttcattgcaatagtgtgttggaattttttgtgtctctcactcggcctaggtagataagtagcatggcgggttaatcattaactacaaggaacccctagtgatggagttggccactccctctctgcgcgctcgctcgctcactgaggccgggcgaccaaaggtcgcccgacgcccgggctttgcccgggcggcctcagtgagcgagcgagcgcgcag

SEQ ID NO: 2007 - DNA, 3571 bp, synthetic construct
  source 1..3571: mol_type = other DNA
ctgcgcgctcgctcgctcactgaggccgcccgggcaaagcccgggcgtcgggcgacctttggtcgcccggcctcagtgagcgagcgagcgcgcagagagggagtggccaactccatcactaggggttccttgtagttaatgattaacccgccatgctacttatctaccagggtaatggggatcctctagaactatagctagtcgacattgattattgactagttattaatagtaatcaattacggggtcattagttcatagcccatatatggagttccgcgttacataacttacggtaaatggcccgcctggctgaccgcccaacgacccccgcccattgacgtcaataatgacgtatgttcccatagtaacgccaatagggactttccattgacgtcaatgggtggagtatttacggtaaactgcccacttggcagtacatcaagtgtatcatatgccaagtacgccccctattgacgtcaatgacggtaaatggcccgcctggcattatgcccagtacatgaccttatgggactttcctacttggcagtacatctacgtattagtcatcgctattaccatgtcgaggccacgttctgcttcactctccccatctcccccccctccccacccccaattttgtatttatttattttttaattattttgtgcagcgatgggggcggggggggggggcgcgcgccaggcggggcggggcggggcgaggggcggggcggggcgaggcggagaggtgcggcggcagccaatcagagcggcgcgctccgaaagtttccttttatggcgaggcggcggcggcggcggccctataaaaagcgaagcgcgcggcgggcgggagcaagcttcgtttagtgaaccgtcagatcgcctggagacgccatccacgctgttttgacctccatagaagacaccgggaccgatccagcctccgcggattcgaatcccggccgggaacggtgcattggaacgcggattccccgtgccaagagtgacgtaagtaccgcctatagagtctataggcccacaaaaaatgctttcttcttttaatatacttttttgtttatcttatttctaatactttccctaatctctttctttcagggcaataatgatacaatgtatcatgcctctttgcaccattctaaagaataacagtgataatttctgggttaaggcaatagcaatatttctgcatataaatatttctgcatataaattgtaactgatgtaagaggtttcatattgctaatagcagctacaatccagctaccattctgcttttattttatggttgggataaggctggattattctgagtccaagctaggcccttttgctaatcatgttcatacctcttatcttcctcccacagctcctgggcaacgtgctggtctgtgtgctggcccatcactttggcaaagaattgggattcgaaccggtgccgccaccatggaattctctagcccatctagagaggaatgtcctaagcctctgtcaagagtgtccatcatggctggcagcctgacaggcctgctgctgctgcaggctgtgtcctgggccagtggagccaggccctgcatccctaagtcctttggctattcttctgtggtctgtgtgtgtaatgccacttactgtgacagctttgaccctcctaccttccctgcccttggaacattcagcagatatgagagcaccagatctggcagaagaatggaactgagcatgggcccaatccaggccaaccacacaggcacaggcctcctgctgacactgcaacctgagcagaagttccagaaggtgaagggatttggaggtgccatgacagatgctgctgctctgaacatcctggccctctccccacctgctcagaacctgctgcttaaaagctacttctctgaggaaggcattggctataacatcatcagagtgcccatggccagctgtgacttcagcatcagaacatacacttatgctgatacacctgatgacttccaactgcacaacttcagtctgcctgaagaggacacaaagctgaaaatccccctgatccacagggccctccagctggcccagagacctgtgagcctgctggcctctccttggacaagccccacctggctgaagactaatggagctgtgaatggcaagggcagcctgaagggccagcctggggacatctaccaccaaacctgggctaggtactttgtcaaattcctggatgcctatgctgagcataagctgcaattttgggctgttacagctgagaatgagccttctgcaggcctgctgtctggatatcctttccagtgcctgggcttcacccctgagcaccagagagactttattgccagagatctggggccaaccctggctaacagcacacaccacaatgtgaggctgctgatgctggatgaccagaggctgctgctcccccactgggccaaggtggtgctgacagatccagaggctgccaaatatgtgcatgggattgctgtccactggtacctggatttcctggcccctgccaaggccaccctgggagaaacacatagactgtttcctaataccatgctgtttgcctctgaggcctgtgtgggcagcaagttctgggaacaatctgtgagactgggcagctgggacagaggaatgcagtacagccacagcatcattaccaacctgctgtatcatgtggtgggctggacagactggaacctggccctcaaccctgaagggggccccaactgggtgaggaactttgtggactctcctatcattgtggatattaccaaggataccttctacaagcagcctatgttctaccacctgggccacttcagcaagttcatcccagagggatctcagagggtgggccttgtggcatctcagaaaaatgacctagatgctgttgccctgatgcaccctgatgggtcagcagtggtagtggtcctgaatagaagctccaaggatgtgccactgactatcaaggacccagctgtaggatttctggaaaccatcagtcctgggtacagcatccacacttacctctggaggaggcagtagtaacctcgaggtaccaggagctcttctcctagtgaattctaccagtgccatagatagttaagtgaattctaccagtgccatagatagttaagtgaattctaccagtgccatagatagttaagtgaattctaccagtgccatactgcagtcaggtctataccatcgaggacggggtgaactacgcctgaggatccgatctttttccctctgccaaaaattatggggacatcatgaagccccttgagcatctgacttctggctaataaaggaaatttattttcattgcaatagtgtgttggaattttttgtgtctctcactcggcctaggtagataagtagcatggcgggttaatcattaactacaaggaacccctagtgatggagttggccactccctctctgcgcgctcgctcgctcactgaggccgggcgaccaaaggtcgcccgacgcccgggctttgcccgggcggcctcagtgagcgagcgagcgcgcag

SEQ ID NO: 2008-3635 - skipped (1628 entries)

SEQ ID NO: 3636 - protein, 743 aa, synthetic construct
MAADGYLPDWLEDNLSEGIREWWALKPGAPQPKANQQHQDNARGLVLPGYKYLGPGNGLDKGEPVNAADAAALEHDKAYDQQLKAGDNPYLKYNHADAEFQERLKEDTSFGGNLGRAVFQAKKRLLEPLGLVEEAAKTAPGKKRPVEQSPQEPDSSAGIGKSGAQPAKKRLNFGQTGDTESVPDPQPIGEPPAAPSGVGSLTMASGGGAPVADNNEGADGVGSSSGNWHCDSQWLGDRVITTSTRTWALPTYNNHLYKQISNSTSGGSSNDNAYFGYSTPWGYFDFNRFHCHFSPRDWQRLINNNWGFRPKRLNFKLFNIQVKEVTDNNGVKTIANNLTSTVQVFTDSDYQLPYVLGSAHEGCLPPFPADVFMIPQYGYLTLNDGSQAVGRSSFYCLEYFPSQMLRTGNNFQFSYEFENVPFHSSYAHSQSLDRLMNPLIDQYLYYLSKTINGSGQNQQTLKFSVAGPSNMAVQGRNYIPGPSYRQQRVSTTVTQNNNSEFAWPGASSWALNGRNSLMNPGPAMASHKEGEDRFFPLSGSLIFGKQGTGRDNVDADKVMITNEEEIKTTNPVATESYGQVATNHQSPLNGAVHLYAQAQTGWVQNQGILPGMVWQDRDVYLQGPIWAKIPHTDGNFHPSPLMGGFGMKHPPPQILIKNTPVPADPPTAFNKDKLNSFITQYSTGQVSVEIEWELQKENSKRWNPEIQYTSNYYKSNNVEFAVNTEGVYSEPRPIGTRYLTRNL

SEQ ID NO: 3637-3647 - skipped (11 entries)

SEQ ID NO: 3648 - protein, 9 aa, synthetic construct
PLNGAVHLY
